(19) United States
(12) Patent Application Publication
(10) Pub. No.: US 2021/0255199 A1
(43) Pub. Date: Aug. 19, 2021

(54) PREDICTION OF DRUG-FREE REMISSION IN RHEUMATOID ARTHRITIS

(71) Applicant: University of Newcastle Upon Tyne, Newcastle Upon Tyne (GB)

(72) Inventors: Kenneth Baker, Newcastle Upon Tyne (GB); John Isaacs, Newcastle Upon Tyne (GB); Arthur Pratt, Newcastle Upon Tyne (GB)

(21) Appl. No.: 17/045,428

(22) PCT Filed: Mar. 28, 2019
(86) PCT No.: PCT/GB2019/050902

§ 371 Date: Oct. 5, 2020

(30) Foreign Application Priority Data
Apr. 5, 2018 (GB) 1805685.3

(51) Int. Cl. G01N 33/68; G01N 33/50

(52) U.S. Cl. CPC G01N 33/6893; G01N 33/6863; G01N 2800/54; G01N 2800/102; G01N 33/5005

(57) ABSTRACT

Certain embodiments of the present invention relate to methods and products for use in the determination of treatment of rheumatoid arthritis (RA). Particularly, although not exclusively, embodiments of the present invention relate to predicting the likelihood of a patient suffering from rheumatoid arthritis maintaining remission following cessation of disease-modifying anti-rheumatic drugs (DMARDs). Certain embodiments of the present invention are based on the determination of certain biomarkers of drug-free remission in RA following cessation of DMARD therapy.

### FIELD OF THE INVENTION

[0001] Certain embodiments of the present invention relate to methods and products for use in the determination of treatment of rheumatoid arthritis (RA). Particularly, although not exclusively, embodiments of the present invention relate to predicting the likelihood of a patient suffering from rheumatoid arthritis maintaining remission following cessation of disease-modifying anti-rheumatic drugs (DMARDs). Certain embodiments of the present invention are based on the determination of certain biomarkers of drug-free remission in RA following cessation of DMARD therapy.

### BACKGROUND TO THE INVENTION

[0002] Rheumatoid arthritis (RA) is a common autoimmune disease with an estimated worldwide prevalence of 0.24% that is characterised by joint inflammation and systemic manifestations. Chronic synovitis causes joint pain, stiffness, swelling and ultimately erosions leading to irreversible joint deformity. In addition to physical disability, additional extra-articular features such as accelerated atherosclerosis add to the excess morbidity and mortality of the disease.

[0003] With an increasingly ageing population, the cumulative lifetime risk of RA can be expected to increase over the next few decades. RA inflicts a substantial burden of illness—in 2010 alone, it was the cause of an estimated 3.7 million years lived with disability worldwide. The best-recognised morbidities associated with RA are physical disability and pain resulting from the progressive joint destruction associated with uncontrolled synovitis.

[0004] There is no single investigation that is diagnostic of RA, which remains a clinical diagnosis based largely upon medical history and examination findings. Nevertheless, there are several biochemical, serological and radiological investigations that can provide evidence to support the diagnostic process.

[0005] The diagnosis of RA has been formalised for research purposes by the creation of classification criteria endorsed by leading rheumatology societies. Until recently, the most widely used of these was the 1987 American College of Rheumatology (ACR) RA classification criteria. Whilst providing a sensitivity and specificity of around 90% for the diagnosis of established RA versus non-RA rheumatic disease controls, the 1987 criteria relied heavily upon features of advanced disease such as radiographic joint damage. Consequently, the 1987 criteria were criticised for their insensitivity to early disease, which made them out-dated with a later evolution towards intervention at earlier stages of clinical presentation. To address this shortfall, the ACR in collaboration with the European League Against Rheumatism (EULAR) released updated RA classification criteria in 2010. The 2010 criteria use a point-based system to define RA across four domains: joint involvement, serological status, biochemical inflammatory markers and symptom duration.

[0006] There are two principal aims in the management of RA, namely the alleviation of joint symptoms, and a reduction (ideally prevention) of joint damage and systemic disease manifestations. Long-term outcomes are more favourable when treatment is started early, and when there is comprehensive suppression of inflammation. Indeed, disease remission is now a realistic target of treatment for RA in the modern era.

[0007] One class of compounds used for the treatment of RA are so-called disease modifying anti-rheumatic drugs (DMARDs). Many of the early DMARDs including methotrexate, sulphasalazine and hydroxychloroquine are still in widespread use today.

[0008] Over the past two decades, increasing knowledge of the molecular basis of inflammation in RA, coupled with technological advances in therapeutic antibody production, have led to the development of novel biopharmaceutical agents. The mechanisms of action of these so-called “biologic” disease modifying anti-rheumatic drugs (bDMARDs) are typified by the potent but selective blockade of an inflammatory mediator, usually by means of a specific antibody or receptor fusion protein. The first of these agents to be licensed for use in RA was infliximab, a chimeric monoclonal antibody directed against tumour necrosis factor α (TNF-α). The following years have seen an explosion in the number of biologic agents, and their potent action has revolutionised the treatment of RA resistant to conventional synthetic DMARD therapy.

[0009] Remission is achievable with DMARDs prescribed in modern treat-to-target strategies, albeit with potential side effects and the requirement for safety monitoring. Approximately half of patients with RA who achieve clinical remission with DMARD therapy can expect to achieve sustained drug-free remission (DFR) following DMARD withdrawal. However, there are a lack of biomarkers that, when measured prior to DMARD withdrawal, can predict which patients can achieve DFR.

[0010] It is an aim of the present invention to provide biomarkers of drug-free remission in RA to determine when it is appropriate to stop DMARD therapy once remission has been achieved.

### SUMMARY OF CERTAIN EMBODIMENTS OF THE INVENTION

[0011] The inventors have identified novel biomarkers of drug-free remission in RA, offering insights to the pathophysiology of arthritis flare. The identification of these biomarkers allows methods to guide DMARD withdrawal, with consequent minimisation of medication side effects and healthcare costs. The identification of these biomarkers allows the development of personalised treatment strategies for RA, and related assays and kits. Accordingly, the invention provides:
[0012] A method of determining the likelihood of a patient maintaining remission of rheumatoid arthritis (RA) following cessation of treatment with one or more disease-modifying anti-rheumatic drugs (DMARDs), the method comprising:
   [0013] (i) detecting levels of one or more biomarkers in a sample of CD4⁺ T cells obtained from the patient; and
   [0014] (ii) comparing the levels obtained in (i) with one or more reference levels;

[0015] wherein a difference in levels of the one or more biomarkers compared to the one or more reference levels is indicative of an increased likelihood of maintaining remission following the cessation of treatment with the one or more DMARDs, and wherein no difference in levels of the one or more biomarkers compared to the one or more reference levels is indicative of a decreased likelihood of maintaining remission following the cessation of treatment with the one or more DMARDs.
[0016] A method of treating or preventing RA in a patient undergoing treatment with one or more DMARDs, wherein:
   [0017] (i) the patient has been identified as having an increased likelihood of maintaining remission of RA following cessation of treatment with one or more DMARDs according to any method as described herein, and treatment with the one or more DMARDs is reduced or ceased; or
   [0018] (ii) the patient has been identified as having a decreased likelihood of maintaining remission of RA following cessation of treatment with one or more DMARDs according to any method described herein, and treatment with the one or more DMARDs is maintained or increased.
[0019] A therapeutic agent for use in a method of treating or preventing RA in a patient, wherein the patient has been identified as having a decreased likelihood of maintaining remission of RA following cessation of treatment with the one or more DMARDs according to any method as described herein, and the therapeutic agent is the one or more DMARDs.
[0020] An assay comprising:
   [0021] (i) purifying or labelling CD4+ T cells from a sample obtained from a patient having or suspected of having RA;
   [0022] (ii) detecting levels of one or more biomarkers in the purified or labelled CD4+ T cells; and
   [0023] (iii) comparing the levels obtained in (ii) with one or more reference levels:

[0024] wherein the levels of one or more biomarkers comprise:
[0025] (a) expression levels of at least one, two, three or more genes selected from any one of SEQ ID NOs: 1 to 19; and/or
[0026] (b) expression levels of at least one, two, three or more gene variants comprising a sequence having at least 95% homology to any one of SEQ ID Nos 1 to 19 based on nucleic acid identity over the entire length of the sequence.
[0027] A kit comprising reagents to carry out any method or assay described herein, wherein the kit comprises one or more agents capable of specifically binding to the one or more biomarkers within CD4⁺ T cells in a sample obtained from the patient.

### DETAILED DESCRIPTION OF CERTAIN EMBODIMENTS OF THE INVENTION

[0028] Certain embodiments of the present invention will now be described hereinafter, by way of example only, with reference to the accompanying drawings in which:

[0029] FIG. 1 shows the design of the BioRRA study together with sample size estimations. CRP, C-reactive protein; DAS, disease activity score: DMARD, disease-modifying anti-rheumatic drug; IA, intra-articular: IM, intra-muscular.

[0030] FIG. 2 shows a flow diagram with patient recruitment and outcomes.

[0031] FIG. 3 shows distribution of log 2-transformed concentrations of MCP1 (A), IL-27 (B), and CRP (C) at baseline in flare and remission groups. Solid line represents mean value, statistical significance of difference in means calculated by unpaired Student's T-test.

[0032] FIG. 4 shows a Kaplan-Meier plot of DMARD-free survival for the study population dichotomised by baseline composite MCP1/CRP score using the remission threshold. All patients with a negative composite score maintained DFR.

[0033] FIG. 5 shows a Kaplan-Meier plot of DMARD-free survival for the study population dichotomised by baseline composite MCP1/IL-27 score using the flare threshold. All patients with a positive composite score experienced an arthritis flare.

[0034] FIG. 6 shows a volcano plot of log (fold change) in chemokine/cytokine concentration between baseline versus flare visit and associated adjusted p values (Student's paired T-test, Benjamini-Hochberg) for those patients who experienced an arthritis flare. Thresholds for significance are shown at fold-change >1.5 and adjusted p<0.05. FC: fold-change.

[0035] FIG. 7 shows longitudinal change in selected cytokines and chemokines. Each line represents an individual patient; those who experienced an arthritis flare are shown in red and continuous, whereas those who remained in remission are shown in grey and dashed. Spikes in CRP and SAA secondary to urinary tract infection (*) and chest infection (+) are highlighted.

[0036] FIG. 8 shows volcano plots showing baseline differential gene expression in circulating CD4′ T cells between patients who subsequently experienced an arthritis flare versus those who remained in drug-free remission following DMARD cessation. Plots are shown with (A: adjusted p-value <0.05) and without (B: unadjusted p<0.001) multiple test correction. Horizontal lines represent log-fold change (log₂FC)>1.5.

[0037] FIG. 9 shows volcano plots showing baseline differential gene expression in circulating CD4⁺ T cells between patients who subsequently experienced an arthritis flare following DMARD cessation versus healthy controls (HC). Plots are shown with (A: adjusted p-value <0.05) and without (B: unadjusted p<0.001) multiple test correction. Horizontal lines represent log-fold change (log₂FC)>1.5. Genes that exceeded both thresholds are highlighted in red.

[0038] FIG. 10 shows volcano plots showing baseline differential gene expression in circulating CD4⁺ T cells between patients who subsequently remained in drug-free remission following DMARD cessation versus healthy controls (HC). Plots are shown with (A: adjusted p-value <0.05) and without (B: unadjusted p<0.001) multiple test correction. Horizontal lines represent log-fold change (log₂FC)>1.5. Genes that exceeded both thresholds are highlighted in red.

[0039] FIG. 11 shows volcano plots showing longitudinal change in gene expression between time of arthritis flare versus baseline for patients who experienced an arthritis flare following DMARD cessation. Plots are shown with (A: adjusted p-value <0.05) and without (B: unadjusted p<0.001) multiple test correction. Horizontal lines represent log-fold change (log₂FC)>1.5. Genes that exceeded both thresholds are highlighted in red.

[0040] FIG. 12 shows volcano plots showing longitudinal change in gene expression between month six versus baseline for patients who remained in drug-free remission following DMARD cessation. Plots are shown with (A: FDR-corrected p-value <0.05) and without (B: unadjusted p<0.001) multiple test correction. Horizontal lines represent log-fold change (log₂FC)>1.5. Genes that exceeded both thresholds are highlighted in red.

[0041] FIG. 13 shows overlap of differentially expressed genes identified in different contrast pairs at the unadjusted p<0.001 significance threshold. F: flare patient; FV: flare visit; HC: healthy control; V6: month 6 visit; VB: baseline visit; VF: flare visit; R: remission patient.

[0042] FIG. 14 shows volcano plot showing baseline gene expression in circulating CD4⁺ T cells as analysed by univariate Cox regression of time-to-flare following DMARD cessation. The horizontal line shows the unadjusted p-value <0.001 threshold—genes that exceeded this threshold are highlighted in red. B: univariate Cox regression coefficient.

[0043] FIG. 15 shows receiver-operating characteristic curves for RNAseq composite biomarker scores for the prediction of flare following DMARD cessation. A MCP1+IL27+CRP, B: MCP1+IL27, C: MCP1+CRP, D: MCP1, E: IL27+CRP, E: CRP, F: IL27.

[0044] FIG. 16A: shows Kaplan-Meier plot of DMARD-free survival stratified by 3-gene composite score >60.55 (red) versus ≤60.55 (blue). B: Kaplan-Meier plot of DMARD-free survival stratified by 3-gene composite score >59.19 (red) or 559.19 (blue). P-values calculated by log-rank test.

[0045] FIG. 17 shows ROC curves for 5-variable (A) and 4-variable (B—dropping ln(IL27+1)) composite scores. Threshold values used for assessment of predictive performance are highlighted by crosses.

[0046] FIG. 18 shows predictive performance metrics of the two composite scores.

### SEQUENCE LISTING

[0047] SEQ ID NO: 1 shows human genomic nucleotide sequence of ENSG00000102362.

[0048] SEQ ID NO: 2 shows human genomic nucleotide sequence of ENSG00000247033.

[0049] SEQ ID NO: 3 shows human genomic nucleotide sequence of ENSG00000276571.

[0050] SEQ ID NO: 4 shows human genomic nucleotide sequence of ENSG00000204965.

[0051] SEQ ID NO: 5 shows human genomic nucleotide sequence of ENSG00000241146.

[0052] SEQ ID NO: 6 shows human genomic nucleotide sequence of ENSG00000250030.

[0053] SEQ ID NO: 7 shows human genomic nucleotide sequence of ENSG00000213296.

[0054] SEQ ID NO: 8 shows human genomic nucleotide sequence of ENSG00000229619.

[0055] SEQ ID NO: 9 shows human genomic nucleotide sequence of ENSG00000125046.

[0056] SEQ ID NO: 10 shows human genomic nucleotide sequence of ENSG00000182489.

[0057] SEQ ID NO: 11 shows human genomic nucleotide sequence of ENSG00000144366.

[0058] SEQ ID NO: 12 shows human genomic nucleotide sequence of ENSG00000237473.

[0059] SEQ ID NO: 13 shows human genomic nucleotide sequence of ENSG00000228010.

[0060] SEQ ID NO: 14 shows human genomic nucleotide sequence of ENSG00000250827.

[0061] SEQ ID NO: 15 shows human genomic nucleotide sequence of ENSG00000042286.

[0062] SEQ ID NO: 16 shows human genomic nucleotide sequence of ENSG00000231305.

[0063] SEQ ID NO: 17 shows human genomic nucleotide sequence of ENSG00000255330.

[0064] SEQ ID NO: 18 shows human genomic nucleotide sequence of ENSG00000227070.

[0065] SEQ ID NO: 19 shows human genomic nucleotide sequence of ENSG00000162636.

[0066] The practice of embodiments of the present invention employs, unless otherwise indicated, conventional techniques of chemistry, molecular biology, pharmaceutical formulation, pharmacology and medicine, which are within the skill of those working in the art.

[0067] Most general chemistry techniques can be found in Comprehensive Heterocyclic Chemistry IF (Katritzky et al., 1996, published by Pergamon Press); Comprehensive Organic Functional Group Transformations (Katritzky et al., 1995, published by Pergamon Press): Comprehensive Organic Synthesis (Trost et al., 1991, published by Pergamon); Heterocyclic Chemistry (Joule et al. published by Chapman & Hall): Protective Groups in Organic Synthesis (Greene et al., 1999, published by Wiley-Interscience); and Protecting Groups (Kocienski et al., 1994).

[0068] Most general molecular biology techniques can be found in Sambrook et al, Molecular Cloning, A Laboratory Manual (2001) Cold Harbor-Laboratory Press, Cold Spring Harbor, N.Y. or Ausubel et al., Current Protocols in Molecular Biology (1990) published by John Wiley and Sons, N.Y.

[0069] Most general pharmaceutical formulation techniques can be found in Pharmaceutical Preformulation and Formulation (2^{nd} Edition edited by Mark Gibson) and Pharmaceutical Excipients: Properties, Functionality and Applications in Research and Industry (edited by Otilia M Y Koo, published by Wiley).

[0070] Most general pharmacological techniques can be found in A Textbook of Clinical Pharmacology and Therapeutics (5^{th} Edition published by Arnold Hodder).

[0071] Most general techniques on the prescribing, dispensing and administering of medicines can be found in the British National Formulary 72 (published jointly by BMJ Publishing Group Ltd and Royal Pharmaceutical Society).

[0072] Unless defined otherwise, all technical and scientific terms used herein have the same meaning as commonly understood by one of ordinary skill in the art to which this disclosure belongs. For example, the Concise Dictionary of Biomedicine and Molecular Biology. Juo, Pei-Show, 2^{nd} ed., 2002, CRC Press; The Dictionary of Cell and Molecular Biology, 3^{rd} ed., Academic Press; and the Oxford University Press, provide a person skilled in the art with a general dictionary of many of the terms used in this disclosure. For chemical terms, the skilled person may refer to the International Union of Pure and Applied Chemistry (IUPAC).

[0073] Units, prefixes and symbols are denoted in their Système International d'Unités (SI) accepted form. Numeric ranges are inclusive of the numbers defining the range.

[0074] Biomarkers of Drug-Free Remission of RA

[0075] The present invention relates to biomarkers of drug-free remission of RA. In certain embodiments, the invention provides a method of determining the likelihood of a patient suffering or who has suffered from RA maintaining remission following cessation of treatment with at least one or more DMARDs.

[0076] The patient may be any individual. Typically, the patient is human. Typically, the patient has RA or has suffered from RA but is in remission following treatment with one or more DMARDs. For example, the patient may no longer exhibit any symptoms of RA. In other words, the patient may be asymptomatic. Alternatively, the patient may exhibit reduced or dramatically reduced symptoms of RA.

[0077] Currently “remission of RA” is typically defined in terms of disease activity. In 2011, the ACR and EULAR published joint remission criteria to develop a definition of remission in RA that is “stringent but achievable”. The remission criteria is outlined in the Table below:

| | |
|---|---|
| Boolean | At any time point, patient must satisfy the following: |
| definition | Tender joint count ≤1 |
| | Swollen joint count ≤1 |
| | C reactive protein ≤1 mg/dL (10 mg/L) |
| | Patient global assessment ≤1 (on a 0-10 scale) |
| Index | At any time point, patient must have a Simplified |
| definition | Disease Activity Index score of ≤3.3 |

The American College of Rheumatology (ACR)/European League Against Rheumatism (EULAR) 2011 remission criteria for rheumatoid arthritis. Reproduced from Annals of the Rheumatic Diseases, Felson et al., volume 70, pages 404-413, copyright 2011

[0078] In certain embodiments, the method comprises determining the patient's ACR/EULAR Boolean Remission criteria (i.e., definition) as Tender joint count ≤1, Swollen joint count ≤1, patient global assessment of ≤1 (i.e., less than or equal to 1 on a 0-10 clinical scale) and C reactive protein ≤1 mg/dL (10 mg/L). In particular, patients determined as having Tender joint count ≤1 (i.e., less than or equal to 1 on a 0-10 clinical scale), Swollen joint counts ≤1 (i.e., less than or equal to 1 on a 0-10 clinical scale), patient global assessment of ≤1 (i.e., less than or equal to 1 on a 0-10 clinical scale), and C reactive protein ≤1 mg/dL (10 mg/L) may be classified as in remission for RA. Alternatively, patients determined as having Tender joint count >1 (i.e., more than 1 on a 0-10 clinical scale), Swollen joint count >1 (i.e., more than 1 on a 0-10 clinical scale), patient global assessment of ≤1 (i.e., less than or equal to 1 on a 0-10 clinical scale), and/or C reactive protein >1 mg/dL (10 mg/L) may be classified as having active RA (i.e., not in remission).

[0079] In certain embodiments, the method comprises determining whether the patient has achieved DAS28-CRP remission, as extensively used in current clinical practice and outlined in the Table below:

| DAS28-CRP remission | [0.56√(TJC28) + 0.28√(SJC28) + |
|---|---|
| (Fleischmann et al., 2015) | 0.36ln(CRP + 1) + 0.014(VASₚₐₜᵢₑₙₜ) + |
| | 0.96] < 2.4 |

The final clinical remission definition used in the BioRRA study. CRP, C-reactive protein in mg/L; DAS28, disease activity score in 28 joints; SJC28, swollen joint count in 28 joints; TJC28, tender joint count in 28 joints; VASₚₐₜᵢₑₙₜ, patient visual analogue score in millimetres (on 0-100 mm scale).

[0080] In certain embodiments, the method comprises determining the patients DAS28-CRP criteria (i.e. definition) as ≤2.4. For example, patients having DAS28-CRP criteria as <2.4 (i.e., less than 2.4) may be classified as in remission for RA. Alternatively, patients having DAS28-CRP criteria as ≥2.4 (i.e., more than or equal to 2.4) may be classified as having active RA (i.e., not in remission).

[0081] The patient may have been treated with any one or more DMARDs. In certain embodiments, the patient may have been treated with a single DMARD (i.e., a monotherapy). In certain embodiments, the patient may have been treated with more than one DMARD (i.e., a combination therapy).

[0082] In certain embodiments, the patient may have been treated with one or more bDMARDs such as etanercept, infliximab, adalimumab, certolizumab, golimumab, rituximab, abatacept, tocilizumab and/or sarilumab, In certain embodiments, the patient may have been treated with one or more targeted synthetic DMARDs (tsDMARD). For example, the patient may have been treated with a tsDMARD selected from tofacitinib, baricitinib, filgotinib, upadicitinib and/or any other drug in this class.

[0083] In certain embodiments, the patient may have been treated with one or more conventional synthetic DMARDs. In certain embodiments, the patient may have been treated with one or more of methotrexate, leflunomide, sulfasalazine and/or hydroxychloroquine. For example, the patient may have been treated with methotrexate only (i.e., methotrexate monotherapy). Alternatively, the patient may have been treated with methotrexate in combination with an additional DMARD (i.e., methotrexate combination therapy). In certain embodiments, the patient may have been treated with combinations of DMARDs that don't include methotrexate.

[0084] For example, the patient may have been treated with sulfasalazine in combination with hydroxychloroquine.

[0085] In the methods of the invention, the levels of one or more biomarkers in a sample of CD4⁺ T cells obtained from the patient are detected. Typically, the sample of CD4⁺ T cells comprises purified CD4⁺ T cells (i.e., isolated from other cell types) or labelled CD4⁺ T cells (to allow the specific detection of biomarkers within the CD4+ T cells).

[0086] The sample may be from any tissue or bodily fluid from the patient containing CD4⁺ T cells. Typically, the sample is derived from a blood sample. The sample is typically processed before the method is carried out, for example protein, RNA or DNA extraction may be carried out. The biomarkers in the sample of CD4⁺ T cells (i.e., polynucleotide or protein) may be cleaved either physically or chemically, for example using a suitable enzyme. In one embodiment, polynucleotides in the sample are copied or amplified, for example using a PCR based method. Methods for obtaining samples from patients are well known in the art.

[0087] In certain embodiments, levels of one or more biomarkers in purified CD4⁺ T cells are detected. In other words, the CD4⁺ T cells in the sample are isolated or substantially isolated from other cell types prior to detecting levels of the one or more biomarkers. Any method of purifying CD4⁺ T cells may be used. For example, CD4⁺ T cells may be isolated from plasma or serum samples following established protocols in the art (see, for example, Pratt et al., 2011). In some embodiments, CD4⁺ T cells may be isolated following column-based immunoprecipitation methods. The levels of biomarkers in the purified CD4⁺ T cells may then be measured using any one or more techniques as discussed herein.

[0088] The phrase “detecting levels of one or more biomarkers” typically means detecting the expression levels (i.e., amount) of one or more genes (i.e., polynucleotide sequences) in the CD4⁺ T cells. In certain embodiments, the level of a transcription product (i.e., mRNA, tRNA or micro RNA) or its complement (i.e., a cDNA complement of the transcription product) are detected in the sample. In certain embodiments, the level of a translation product (i.e., protein or polypeptide sequences or metabolite thereof) are detected in the sample. Gene expression can be measured by detecting the presence, quantity, or activity of a DNA, RNA, or polypeptide, or modifications thereof (e.g., splicing, phosphorylation, and acetylation) associated with a given gene.

[0089] Detecting levels of one or more biomarkers may comprise contacting a polynucleotide or protein in a sample from the patient with a specific binding agent for the biomarker and determining whether the agent binds to the polynucleotide or protein, wherein binding of the agent to the biomarker can be used to quantify levels of the biomarker.

[0090] A specific binding agent is an agent that binds with preferential or high affinity to the biomarker but does not bind or binds with only low affinity to other polynucleotides or proteins. The specific binding agent may be a probe or primer. The probe may be a protein (such as an antibody as described below) or an oligonucleotide. The probe may be labelled or may be capable of being labelled indirectly. The binding of the probe to the polynucleotide or protein may be used to immobilise either the probe or the polynucleotide or protein. The primer may be a PCR primer.

[0091] In some embodiments, expression levels of one or more genes are detected by microarray. In some embodiments, expression levels of one or more genes are detected by PCR techniques such as quantitative reverse transcriptase polymerase chain reaction (qRT-PCR). Procedures for performing qRT-PCR are well known in the art. In some embodiments, the expression levels of one or more genes are detected by sequencing methods such as next generation sequencing.

[0092] In some embodiments, the specific binding agent may be capable of specifically binding the amino acid sequence encoded by any one or more of the gene sequences described herein (i.e., encoded by any one or more of SEQ ID Nos 1 to 19). For example, the specific binding agent may be an antibody or antibody fragment. In some embodiments, methods of detecting levels of one or more biomarkers comprise measuring the levels of proteins present in the sample. This may be achieved by methods known to those skilled in the art. Such methods include immunoassays, for example immunohistochemistry, ELISA, Western blots, immunoprecipitation followed by SDS-PAGE and immunocytochemistry, and the like.

[0093] In certain embodiments, levels of one or more biomarkers in labelled CD4⁺ T cells are detected. In other words, CD4⁺ T cells may be labelled in a sample that includes other cell types, in order to allow the specific detection of biomarkers within the CD4⁺ T cells. For example, the methods may comprise identifying and/or measuring CD4⁺ T cell surface protein markers in combination with the levels of one or more biomarkers within the CD4⁺ T cells. In some embodiments, the PrimeFlow™ RNA assay (Affymetrix eBisocience Ltd.) is used to detect levels of one or more biomarkers within a labelled sample of CD4⁺ T cells. This technique uses intracellular in situ-hybridisation of fluorescent probes to target genes in a system which is compatible with existing flow-cytometry equipment (Affymetrix eBioscience, 2017). Such techniques allow the measurement of cell-specific gene expression without the need for cell subset isolation or RNA extraction.

[0094] In certain embodiments, the levels of one or more biomarkers in a sample of CD4 T cells comprise expression levels of at least 1, 2, 3, 4, 5, 6, 7, 8, 9, 10, 11, 12, 13, 14, 15, 16, 17, 18, 19 or more genes selected from the differentially expressed genes identified in Example 4 below.

[0095] For example, the levels of one or more biomarkers may comprise expression levels of at least 1, 2, 3, 4, 5, 6, 7, 8, 9, 10 or more genes selected from any one of SEQ ID Nos 1 to 19. In certain embodiments, expression levels of at least 3 or more of any one of SEQ ID Nos 1 to 19 are detected. Typically, the expression levels of at least 1, 2, 3, 4, 5 or more of any one of SEQ ID Nos 13, 19, 18, 4, 8, 2, 9, 5, 3, 14 and 15 are detected. More typically, the expression levels of at least SEQ ID Nos 18, 19 and 13 are detected.

[0096] In certain embodiments, expression levels of at least one, two, three or more gene variants comprising a sequence having at least 95%, 96%, 97%, 98%, 99% or more homology to any one of SEQ ID Nos 1 to 19 based on nucleic acid identity over the entire length of the sequence are detected. For example, expression levels of at least 1, 2, 3, 4, 5 or more gene variants comprising a sequence having at least 95% homology to any one of SEQ ID Nos 13, 19, 18, 4, 8, 2, 9, 5, 3, 14 or 15 based on nucleic acid identity over the entire length of the sequence may be detected. Typically, the expression levels of one or more gene variants comprising a sequence having at least 95% homology to SEQ ID Nos 18, 19 or 13 based on nucleic acid identity over the entire length of the sequence are detected.

[0097] The above mentioned homology is calculated on the basis of nucleic acid identity (sometimes referred to as “hard homology”). The UWGCG Package provides programs including GAP, BESTFIT, COMPARE, ALIGN and PILEUP that can be used to calculate homology or line up sequences (for example used on their default settings). The BLAST algorithm can also be used to compare or line up two sequences, typically on its default settings. Software for performing a BLAST comparison of two sequences is publicly available through the National Center for Biotechnology Information (http://www.ncbi.nlm nih.gov/). This algorithm is further described below. Similar publicly available tools for the alignment and comparison of sequences may be found on the European Bioinformatics Institute website (http://www.ebi.ac.uk), for example the ALIGN and CLUSTALW programs.

[0098] In certain embodiments, detecting levels of one or more biomarkers in a sample of CD4⁺ T cells obtained from a patient comprise outputting, optionally on a computer, (i) an indication of the levels of the one or more biomarkers and (ii) that this indicates whether or not the patient is likely to maintain remission following the cessation of treatment with the one or more DMARDs.

[0099] In certain embodiments, the levels of one or more biomarkers in a sample of CD4⁺ T cells obtained from the patient are compared with one or more reference (i.e., control) levels. For example, reference levels may be obtained by detecting levels of one or more biomarkers in a sample of CD4⁺ T cells from healthy individuals or patients known to have maintained remission of RA following cessation of treatment with one or more DMARDs. In addition or alternatively, reference levels may be obtained by detecting levels of one or more biomarkers in a sample of CD4⁺ T cells from patients known to have shown flare or relapse of RA symptoms following cessation of treatment with the one or more DMARDs.

[0100] In certain embodiments, a difference in levels of the one or more biomarkers compared to the one or more reference levels is indicative of an increased likelihood of maintaining remission following the cessation of treatment with one or more DMARDs. In other words, a difference in levels of the one or more biomarkers compared to the one or more reference levels indicates that the patient is likely not to exhibit any onset or flare of RA symptoms upon reduction or withdrawal of any DMARD therapy. In such embodiments, DMARD therapy to the patient may be reduced or ceased unless the patient exhibits any onset or flare of RA symptoms.

[0101] In certain embodiments, no difference in levels of the one or more biomarkers compared to the one or more reference levels is indicative of a decreased likelihood of maintaining remission following the cessation of treatment with one or more DMARDs. In other words, no difference in levels of the one or more biomarkers compared to the one or more reference levels indicates that the patient is likely to exhibit an onset or flare of RA symptoms upon reduction or withdrawal of any DMARD therapy. In such embodiments, DMARD therapy to the patient may be re-commenced or increased.

[0102] The phrase “a difference in levels” is understood to mean either a decrease or an increase in levels of the one or more biomarkers compared to the one or more reference levels.

[0103] In some embodiments, the levels of the one or more biomarkers are decreased as compared to the one or more reference levels. For example, levels of the one or more biomarkers may be decreased about 1.1 fold, about 1.2 fold, about 1.3 fold, about 1.4 fold, about 1.5 fold, about 2 fold, about 3 fold, about 4 fold, about 5 fold or more as compared to the one or more reference levels. In other words, the one or more biomarkers may be about 90% or less, about 80% or less, about 75% or less, about 70% or less, about 65% or less, about 50% or less, about 33% or less, about 25% or less, about 20% or less as compared to the one or more reference levels.

[0104] In preferred embodiments, levels of the one or more biomarkers are increased as compared to the one or more reference levels. For example, the level of the one or more biomarkers may be increased about 1.1 fold, about 1.2 fold, about 1.3 fold, about 1.4 fold, about 1.5 fold, about 2 fold, about 3 fold, about 4 fold, about 5 fold or more as compared to the one or more reference levels. In other words, the one or more biomarkers may be more than about 110%, more than about 120%, more than about 130%, more than about 140%, more than about 150%, more than about 200%, more than about 300%, more than about 400%, more than about 500% or more as compared to the one or more reference levels.

[0105] In certain embodiments, detecting levels of one or more biomarkers may further comprise detecting levels of one or more autoantibodies in a sample obtained from a patient. For example, methods may further comprise detecting levels of anti-citrullinated protein antibodies (ACPA) and/or rheumatoid factor (RF) in a sample obtained from the patient and comparing the levels with one or more reference levels, wherein an increase in levels of ACPA and/or RF is indicative of a decreased likelihood of maintaining remission following the cessation of treatment with one or more DMARDs.

[0106] Detection of Cytokines

[0107] In any method described herein, the method further comprises (i) detecting levels of at least one or more cytokines in a sample obtained from the patient, and (ii) comparing the levels obtained in (i) with one or more reference levels. Typically, a difference in levels of the one or more cytokines compared to the one or more reference levels is indicative of an increased likelihood of maintaining remission following the cessation of treatment with one or more DMARDs. Alternatively, no difference in levels of the one or more biomarkers compared to the one or more reference levels is indicative of a decreased likelihood of maintaining remission following the cessation of treatment with the one or more DMARDs.

[0108] The levels of one or more cytokines may be detected by any method known in the art. Typically, one or more cytokines in a sample from the patient are contacted with a specific binding agent for the cytokine and any binding of the agent to the cytokine determined. For example, binding of the agent to the cytokine may be used to quantify levels of the cytokine.

[0109] In certain embodiments, the agent may be an antibody or antibody fragment. For example, methods may comprise measuring the levels of the cytokine protein present in the sample. This may be achieved by any methods known in the art.

[0110] The sample obtained from the patient used to detect the levels of one or more cytokine may be any sample containing cytokines as described herein. For example, the sample may comprise labelled or purified CD4⁺ T cells. Alternatively, a further sample (such as serum or plasma) may be obtained from the patient.

[0111] In certain embodiments, the method further comprises comparing the levels of the one or more cytokines with one or more reference (i.e., control) levels. Typically, the reference levels are obtained by detecting levels of one or more cytokines from healthy individuals or patients already known to have maintained remission of RA following cessation of treatment with the one or more DMARDs. In some embodiments, the reference levels are obtained by detecting levels of one or more cytokines from patients known to have shown flare or relapse of RA symptoms following cessation of treatment with the one or more DMARDs.

[0112] In certain embodiments, a difference in levels of the one or more cytokines compared to the one or more reference levels is indicative of an increased likelihood of maintaining remission following the cessation of treatment with one or more DMARDs. In other words, a difference in levels of the one or more cytokines compared to the one or more reference levels is indicative that the patient is likely not to exhibit any onset or flare of RA symptoms upon reduction or withdrawal of DMARD therapy. In such embodiments, DMARD therapy to the patient may be reduced or ceased unless the patient exhibits any onset or flare of RA symptoms.

[0113] In certain embodiments, no difference in levels of the one or more cytokines compared to the one or more reference levels is indicative of a decreased likelihood of maintaining remission following the cessation of treatment with one or more DMARDs. In other words, no difference in levels of the one or more cytokines compared to the one or more reference levels indicates that the patient is likely to exhibit an onset or flare of RA symptoms upon reduction or withdrawal of any DMARD therapy. In such embodiments, DMARD therapy to the patient may be re-commenced or increased.

[0114] The phrase “a difference in levels” is understood to mean either a decrease or an increase in levels of the one or more cytokines compared to the one or more reference levels. In certain embodiments, the levels of the one or more cytokines are decreased as compared to the one or more reference levels. For example, the level of the one or more cytokines may be decreased by about 1.1 fold, about 1.2 fold, about 1.3 fold, about 1.4 fold, about 1.5 fold, about 2 fold, about 3 fold, about 4 fold, about 5 fold or more as compared to the one or more reference levels. In other words, the level of the one or more cytokines may be less than about 90%, less than about 80%, less than about 75%, less than about 70%, less than about 65%, less than about 50%, less than about 33%, less than about 25%, less than about 20% or less as compared to the one or more reference levels.

[0115] In certain embodiments, the levels of the one or more cytokines are increased as compared to the one or more reference levels. For example, the level of the one or more cytokines may be increased by about 1.1 fold, about 1.2 fold, about 1.3 fold, about 1.4 fold, about 1.5 fold, about 2 fold, about 3 fold, about 4 fold, about 5 fold or more as compared to the one or more reference levels. In other words, the level of the one or more cytokines may be more than about 110%, more than about 120%, more than about 130%, more than about 140%, more than about 150%, more than about 200%, more than about 300%, more than about 400%, more than about 500% or more as compared to the one or more reference levels.

[0116] In certain embodiments, at least 1, 2, 3, 4, 5 or more cytokines are detected. In the methods of the invention, any cytokine predictive of drug-free remission in RA may be detected. Typically, the one or more cytokines comprise at least 1, 2, 3, 4, 5 or more of interleukin-27 (IL-27), CRP, serum amyloid A (SAA), Interferon gamma-induced protein 10 (IP-10), IL-6, monocyte chemoattractant protein-1 (MCP-1), MIP 1-α, VEGF, IL-12. IL-23 and/or IL-16. For example, the one or more cytokines may comprise at least 1, 2, 3, 4, 5 or all 6 of IL-27, CRP, SAA, IP-10, IL-6 and/or MCP-1.

[0117] In preferred embodiments, expression levels of SEQ ID Nos 18, 19 and 13 or variants thereof are detected in combination with any cytokine predictive of drug-free remission in RA such as those listed above. For example, expression levels of SEQ ID Nos 18, 19 and 13 may be detected in combination with at least 1, 2, 3, 4, 5 or more of interleukin-27 (IL-27), CRP, serum amyloid A (SAA), Interferon gamma-induced protein 10 (IP-10), IL-6, and/or monocyte chemoattractant protein-1 (MCP-1). Such combinations are unexpectedly and particularly effective at determining the likelihood of a patient maintaining remission of RA following cessation of treatment with at least one or more DMARDs.

[0118] Clinical Criteria

[0119] In any method described herein, the method may further comprise determining baseline clinical variables predictive of drug-free remission in RA. Typically, the method further comprises determining the patients ACR/EULAR Boolean Remission criteria as described herein. For example, in certain embodiments the invention relates to the unexpected finding that patients having ACR/EULAR Boolean remission at baseline is associated with a significantly lower risk of arthritis flare following DMARD cessation.

[0120] In certain embodiments, the method further comprises determining the patients tender joint count, global assessment on a 0-10 clinical scale, swollen joint count and C reactive protein levels. Patients determined as having ACR/EULAR Boolean Remission criteria (i.e., definition) as Tender joint count ≤1, global assessment of <1, swollen joint count ≤1 and C reactive protein ≤1 mg/dL (10 mg/L) is indicative that the patient has an increased likelihood of maintaining remission of RA following cessation of treatment with one or more DMARDs.

[0121] Alternatively, patients determined as having Tender joint count >1 (i.e., more than 1 on a 0-10 clinical scale), global assessment of >1 (i.e., more than 1 on a 0-10 clinical scale), swollen joint count >1 (i.e., more than 1 on a 0-10 clinical scale) and/or C reactive protein >1 mg/dL (10 mg/L) is indicative that the patient has a decreased likelihood of maintaining remission following the cessation of treatment with one or more DMARDs.

[0122] In certain embodiments, the method may further comprise determining the patients DAS28-CRP as described herein. For example, patients having DAS28-CRP criteria as less than 2.4 is indicative that the patient has an increased likelihood of maintaining remission of RA following cessation of treatment with one or more DMARDs. Alternatively, patients having DAS28-CRP criteria as more than or equal to 2.4 is indicative that the patient has a decreased likelihood of maintaining remission following the cessation of treatment with one or more DMARDs.

[0123] Methods of Treatment

[0124] Also provided herein are methods of treating or preventing RA in a patient undergoing treatment with one or more DMARDs. Therapy and prevention includes, but is not limited to, preventing, alleviating, reducing, curing or at least partially arresting symptoms and/or complications resulting from or associated with RA. The patient can have a genetic predisposition to RA. The patient may be in remission for RA and/or can be asymptomatic.

[0125] In certain embodiments, the patient is (or has been) identified as having an increased likelihood of maintaining remission of RA following cessation of treatment with one or more DMARDs according to any method as described herein. In such embodiments, treatment with the one or more DMARDs is reduced (or tapered) or ceased (i.e., stopped). Alternatively, the patient is (or has been) identified as having a decreased likelihood of maintaining remission of RA following cessation of treatment with the one or more DMARD according to any method as described herein. In such embodiments, treatment with the one or more DMARDs is maintained (i.e., continued at the same level or dosage) or increased (i.e., increased to a higher level or dosage).

[0126] Non-limiting routes of administration of the one or more DMARDs include by oral, intravenous, intraperitoneal, subcutaneous, intramuscular, topical, intradermal, intranasal or intrabronchial administration.

[0127] One or more DMARDs may be administered in an amount effective to prevent, inhibit or delay the development of RA. Suitable doses and dosage regimes for a given patient and one or more DMARDs can be determined using a variety of different methods, such as body-surface area or body-weight, or in accordance with specialist literature and/or individual hospital protocols. Doses may be further adjusted following consideration of a patient's neutrophil count, renal and hepatic function, and history of any previous adverse effects to the one or more DMARDs. Doses may also differ depending on whether a DMARD is used alone or in combination with another therapy. The other therapy may be a specific treatment directed at the disease or condition suffered by the patient or directed at a symptom of such a disease or condition. For example, the other therapy may be a general therapy aimed at treating or improving the condition of a patient with inflammation. For example, treatment with glucocorticoids, salicylates, nonsteroidal anti-inflammatory drugs (NSAIDs), analgesics, aminosalicylates and/or corticosteroids may be combined with one or more other DMARDs.

[0128] Such therapies may be administered separately or sequentially to a patient as part of the same therapeutic regimen. The skilled person will recognize that further modes of administration, dosages of one or more DMARDs and treatment regimens can be determined by the treating physician according to methods known in the art.

[0129] In certain embodiments, the patient has ceased therapy with one or more DMARDs prior to detecting levels of one or more biomarkers in a sample of CD4 T cells obtained from the patient. If the patient is identified as having a decreased likelihood of maintaining remission of RA following cessation of treatment with the one or more DMARDs, the patient is ideally treated with the one or more DMARDs as soon as possible to minimize the chances of flare or onset of RA symptoms. Thus, in some embodiments the method is for preventing the symptoms of RA or decreasing the risk of symptoms of RA re-occurring in the patient. Typically, a patient is treated immediately or shortly after being identified as having a decreased likelihood of maintaining remission of RA following cessation of treatment with one or more DMARDs.

[0130] In certain embodiments, the patient is identified as having an increased likelihood of maintaining remission of RA following cessation of treatment with the one or more DMARDs. In such embodiments, treatment with the one or more DMARDs may be ceased. Typically, the method of the invention may be repeated at intervals (i.e., every 3 months) after the cessation of DMARD therapy, and DMARD therapy re-commenced if the biomarkers suggest that is the optimal course of action. Thus, the invention further provides:
[0131] a method of determining the likelihood of a patient who has ceased treatment with one or more DMARDs maintaining remission of RA, the method comprising:
   [0132] (i) detecting levels of one or more biomarkers in a sample of CD4⁺ T cells obtained from the patient; and
   [0133] (ii) comparing the levels obtained in (i) with one or more reference levels;

[0134] wherein a difference in levels of the one or more biomarkers compared to the one or more reference levels is indicative that treatment with the one or more DMARDs should continue to be ceased, and wherein no difference in levels of the one or more biomarkers compared to the one or more reference levels is indicative that treatment with the one or more DMARDs should be re-commenced.

[0135] In some embodiments, the levels of one or more biomarkers are detected in the patient every 1, 2, 3, 4, 5 or 6 or more months after ceasing treatment with the one or more DMARDs. Typically, the levels of one or more biomarkers are detected for as long as the patient remains in remission.

[0136] Assays

[0137] The invention also provides assays comprising purifying or labelling CD4⁺ T cells from a sample obtained from a patient having or suspected of having RA. Any method may be used to purify CD4⁺ T cells from a sample. For example, CD4⁺ T cells may be isolated following column-based immunoprecipitation as discussed above. Any method may be used to label CD4⁺ T cells from a sample, as discussed above.

[0138] In the assays of the invention, levels of one or more biomarkers comprise expression levels of at least 1, 2, 3, 4, 5, 6, 7, 8, 9, 10 or more genes selected from any one or more of SEQ ID Nos 1 to 19. Typically, expression levels of at least 3 or more of any one of SEQ ID Nos 1 to 19 are detected. More typically, expression levels of at least 1, 2, 3, 4, 5 or more of any one of SEQ ID Nos 13, 19, 18, 4, 8, 2, 9, 5, 3, 14 and 15 are detected. In preferred embodiments, the expression levels of at least SEQ ID Nos 18, 19 and 13 are detected.

[0139] In certain embodiments, expression levels of at least one, two, three or more gene variants comprising a sequence having at least 95%, 96%, 97%, 98%, 99% or more homology to any one of SEQ ID Nos 1 to 19 based on nucleic acid identity over the entire length of the sequence are detected. For example, expression levels of at least 1, 2, 3, 4, 5 or more gene variants comprising a sequence having at least 95% homology to any one of SEQ ID Nos 13, 19, 18, 4, 8, 2, 9, 5, 3, 14 or 15 based on nucleic acid identity over the entire length of the sequence may be detected. In preferred embodiments, the expression levels of one or more gene variants comprising a sequence having at least 95% homology to SEQ ID Nos 18, 19 or 13 based on nucleic acid identity over the entire length of the sequence are detected.

[0140] In certain embodiments, the assay further comprises detecting levels of at least one or more cytokines as described herein. For example, the assay may comprise detecting expression levels of SEQ ID Nos 18, 19 and 13 in combination with one or more cytokine predictive of drug-free remission in RA. Typically, the one or more cytokines comprise at least 1, 2, 3, 4, 5 or more of interleukin-27 (IL-27), CRP, serum amyloid A (SAA), Interferon gamma-induced protein 10 (IP-10), IL-6, monocyte chemoattractant protein-1 (MCP-1), MIP 1-α, VEGF, IL-12. IL-23 and/or IL-16. For example, the one or more cytokines may comprise IL-27, CRP, SAA, IP-10, IL-6 and/or MCP-1.

[0141] In certain embodiments, the assay further comprises determining baseline clinical variables that are predictive of drug-free remission in RA. Typically, the assay may further comprise determining the patients ACR/EULAR Boolean Remission criteria as discussed above.

[0142] In certain embodiments, levels of one or more biomarkers in the CD4⁺ T cells are compared with one or more reference levels as described herein. Typically, the one or more biomarkers in the CD4 T cells are increased by at least about 1.1 fold, about 1.2 fold, about 1.3 fold, about 1.4 fold, about 1.5 fold, about 2 fold, about 3 fold, about 4 fold, about 5 fold or more as compared to the one or more reference levels.

[0143] Kits

[0144] The invention also provides kits comprising reagents to carry out any of the methods or assays as described herein.

[0145] The kits of the invention comprise one or more agents capable of specifically binding to the one or more biomarkers in a sample of CD4⁺ T cells obtained from the patient. In some embodiments, the one or more agents are labelled. For example, an agent may comprise a detection moiety and/or a binding moiety specific for the one or more biomarkers. In some embodiments, the agent comprises an enzyme as a detection moiety, and the kit further comprises a substrate of the enzyme.

[0146] In some embodiments, the one or more agents are primers or probes that may be used in the detection of the one or more biomarkers described herein. These probes and primers may be used for determining the likelihood of a patient maintaining remission of RA following cessation of treatment with one or more DMARDs. Polynucleotide sequences disclosed herein may also be used in the design of primers or probes to detect the one or more biomarkers.

[0147] Such primers, probes and other polynucleotide fragments will preferably be at least 10, preferably at least 15 or at least 20, for example at least 25, at least 30 or at least 40 nucleotides in length. They will typically be up to 40, 50, 60, 70, 100 or 150 nucleotides in length. Probes and fragments can be longer than 150 nucleotides in length, for example up to 200, 300, 400, 500, 600, 700 nucleotides in length, or even up to a few nucleotides, such as five or ten nucleotides, short of a full-length polynucleotide sequence disclosed herein.

[0148] Primers and probes for detecting the one or more biomarkers may be designed using any suitable design software known in the art. For example, primers and probes may be designed using regions of any one of the sequence set forth in SEQ ID NOs: 1 to 19. Homologues of these polynucleotide sequences would also be suitable for designing primers and probes.

[0149] Such homologues typically have at least 95%, at least 97% or at least 99% homology, for example over a region of at least 15, 20, 30, 100 more contiguous nucleotides. The homology may be calculated on the basis of nucleotide identity (sometimes referred to as “hard homology”). Methods for determining homology are described herein.

[0150] The primers or probes may be present in an isolated or substantially purified form. They may be mixed with carriers or diluents that will not interfere with their intended use and still be regarded as substantially isolated. They may also be in a substantially purified form, in which case they will generally comprise at least 90%, e.g. at least 95%, at least 98% or at least 99%, of polynucleotides of the kit.

[0151] In some embodiments, the kit comprises one or more agents capable of specifically binding to any one of SEQ ID Nos 1 to 19. For example, the kit may comprise one or more agents capable of specifically binding to at least SEQ ID NO: 18, 19 and 13.

[0152] In some embodiments, the kit further comprises instructions for using the kit to predict the likelihood of a patient maintaining remission of rheumatoid arthritis (RA) following cessation of treatment with one or more disease-modifying anti-rheumatic drugs (DMARDs).

[0153] In some embodiments, the kit may further comprise one or more additional components such as reagents and/or apparatus necessary for carrying out an in vito assay, e.g. buffers, fixatives, wash solutions, blocking reagents, diluents, chromogens, enzymes, substrates, test tubes, plates, pipettes etc.

[0154] The kit of certain embodiments of the invention may advantageously be used for carrying out a method of certain embodiments of the invention and could be employed in a variety of applications, for example in the diagnostic field or as a research tool. It will be appreciated that the parts of the kit may be packaged individually in vials or in combination in containers or multi-container units. Typically, manufacture of the kit follows standard procedures which are known to the person skilled in the art.

### Example 1—Study Design

[0155] The inclusion, exclusion and DMARD-cessation criteria for the Biomarkers of Remission in Rheumatoid Arthritis (BioRRA) Study are summarised in the Table below:

| | | |
|---|---|---|
| Inclusion | 1. | Clinical diagnosis of rheumatoid arthritis made by |
| criteria | | consultant rheumatologist at least 12 months previously |
| | 2. | Current single or combination use of methotrexate, |
| | | sulfasalazine and/or hydroxychloroquine |
| | 3. | Arthritis currently in remission, as judged clinically by |
| | | referring healthcare professional |
| | 4. | Willing to consider DMARD withdrawal |
| Exclusion | 1. | Use of biologic therapy within the past 6 months |
| criteria | 2. | Received steroids within past 3 months (enteral, |
| | | parenteral or intra-articular) |
| | 3. | Use of any DMARD other than methotrexate, |
| | | sulfasalazine or hydroxychloroquine within the past 6 |
| | | months (or past 12 months for leflunomide) |
| | 4. | Current pregnancy, or pregnancy planned within next 6 |
| | | months |
| | 5. | Current participation within another clinical trial |
| | 6. | Inability to provide informed consent |
| DMARD- | 1. | Clinical remission, defined as DAS28-CRP < 2.4 * |
| cessation | | |
| criteria | | |

Inclusion, exclusion and DMARD cessation criteria for the BioRRA study. Patients who met the inclusion and exclusion criteria were enrolled for the baseline visit, but only those patients who met the DMARD-cessation criteria stopped DMARDs and continued in the study follow-up: ACR/EULAR Boolean remission was initially used as the clinical remission definition, though this was subsequently changed to DAS28-CRP < 2.4

[0156] Inclusion and Remission Criteria

[0157] Patients were recruited to the study if they had a clinical diagnosis of RA, with fulfilment of diagnostic criteria assessed retrospectively by the research team after study enrolment.

[0158] The composite scoring system of DAS28-CRP was used to define clinical remission in the present study, as extensively used in current clinical practice (Table below):

| DAS28-CRP remission | [0.56√(TJC28) + 0.28√(SJC28) + |
|---|---|
| (Fleischmann et al., 2015) | 0.36ln(CRP + 1) + 0.014(VASₚₐₜᵢₑₙₜ) + |
| | 0.96] < 2.4 |

The final clinical remission definition used in the BioRRA study. CRP, C-reactive protein in mg/L; DAS28, disease activity score in 28 joints; SJC28, swollen joint count in 28 joints; TJC28, tender joint count in 28 joints; VASₚₐₜᵢₑₙₜ, patient visual analogue score in millimetres (on 0-100 mm scale).

[0159] The final clinical remission definition used in the BioRRA study. CRP, C-reactive protein in mg/L; DAS28, disease activity score in 28 joints; SJC28, swollen joint count in 28 joints; TJC28, tender joint count in 28 joints; VASₚₐₜᵢₑₙₜₛ, patient visual analogue score in millimetres (on 0-100 mm scale).

[0160] The use of CRP was used owing to its specificity for inflammation. A threshold of DAS28-CRP<2.4 was used as the definition of clinical remission—this is lower than the remission threshold for DAS28-ESR (<2.6) and is in line with recently published data that recommends this lower remission threshold (Fleischmann et al., 2015). Values of CRP below the detectable threshold of the local clinical laboratory (<5 mg/L) were recorded as zero for the purposes of DAS28-CRP calculation.

[0161] Study Design and Sample Size Estimation

[0162] The design of the study together with sample size estimations are summarised in FIG. 1.

[0163] Patients who satisfied both DAS28-CRP<2.4 and an absence of PD signal on ultrasound assessment (see below) at the baseline visit were eligible for DMARD cessation. Further administrations of methotrexate, sulfasalazine and/or hydroxychloroquine were immediately stopped without tapering. Non-DMARDs, including folic acid, remain unaltered and non-steroidal anti-inflammatory drug (NSAID) use was permitted. Research blood tests including serum, plasma, peripheral blood mononuclear cells (PBMCs), CD4⁺ T cell isolation and whole blood RNA TEMPUS™ tubes (Applied Biosystems, Foster City, Calif., USA) were collected at baseline, month 3 and month 6 following DMARD cessation. An US scan was performed again at the month 6 visit. If a patient experienced a flare of their arthritis (defined as DAS28≥2.4) or if they developed PD synovitis on the month 6 scan, then they could receive rescue glucocorticoids and were discharged from the study with their DMARD therapy promptly recommenced by their referring rheumatologist. Those patients who remained in remission at 6 months with no PD synovitis were discharged back to their referring rheumatologist without DMARD therapy. 74 patients were recruited to the study, of which 44 stopped DMARDs.

[0164] Prospective Clinical Variable Assessment

[0165] Pre-specified clinical variables were recorded prospectively at the baseline study visit, as listed in the Table below:

| Baseline variable | Data type |
|---|---|
| Age | Continuous |
| Sex | Binary |
| 28 tender joint count | Discrete |
| 28 swollen joint count | Discrete |
| Patient arthritis visual analogue score (range 0-100) | Continuous |
| ESR | Continuous |
| CRP | Continuous |
| RhF positive | Binary |
| ACPA positive | Binary |
| DAS28-CRP | Continuous |
| DAS28-ESR | Continuous |
| Fulfilment of ACR/EULAR Boolean remission | Binary |
| HAQ-DI (range 0-3) | Continuous |
| Patient global health score (range 0-100) | Continuous |
| Patient pain score (range 0-100) | Continuous |

Baseline clinical variables recorded prospectively in the BioRRA study. CRP: C-reactive protein; ESR: erythrocyte sedimentation rate; RhF: rheumatoid factor; ACPA: anti-citrullinated peptide antibody; HAQ-DI

[0166] Included in these variables is the Health Assessment Questionnaire Disability Index (HAQ-DI), a self-completed questionnaire that quantifies physical disability that has been extensively validated in the setting of RA and other chronic diseases.

[0167] Retrospective Clinical Variable Assessment

[0168] Data were obtained for a range of pre-specified variables, as listed in the Table below. These data were obtained both by patient interview at baseline visit, and from clinical notes review. Historical clinical records were available for all patients and were assessed by a single reviewer. It was acknowledged that the most reliable source of information might differ depending on the variable of interest. A systematic methodology of recording clinical variables was therefore implemented, as shown in the Table below:

| Variable | Data type | Data source |
|---|---|---|
| Year of RA diagnosis | Continuous | Medical notes |
| Months from symptom onset | Continuous | Medical notes |
| to first rheumatology clinic | | |
| review | | |
| Months from first | Continuous | Medical notes |
| rheumatology clinic review | | |
| to commencement of first | | |
| DMARD | | |
| Months since last change in | Continuous | Medical notes |
| DMARD therapy (dose | | |
| and/or drug) | | |
| Months since last | Continuous | Most recent of either |
| glucocorticoid | | medical notes or patient |
| | | interview |
| Smoking status | Categorical | Patient interview |
| | (current/ | |
| | previous/never) | |
| Weekly alcohol unit intake | Continuous | Patient interview |
| Methotrexate use | Categorical | Medical notes |
| | (current/ | |
| | previous/never) | |
| Sulfasalazine use | Categorical | Medical notes |
| | (current/ | |
| | previous/never) | |
| Hydroxychloroquine use | Categorical | Medical notes |
| | (current/ | |
| | previous/never) | |
| Other previous DMARDs | Free text | Medical notes |

Baseline clinical variables recorded retrospectively in the BioRRA study

[0169] Assessment of RA Criteria

[0170] Patients were recruited on the grounds of a clinical diagnosis of RA made by a consultant rheumatologist, with satisfaction of formal classification criteria assessed retrospectively after patient recruitment.

[0171] Healthy Control Participants

[0172] In order to provide a control group for subsequent transcriptomic analyses, four healthy participants were recruited. Each participant donated blood at four time points to mirror those of the patient participants—i.e. baseline, month 1, month 3 and month 6. Healthy participants donated blood between 9 am and 1 pm where possible to minimise circadian variation in laboratory samples. Blood was left to stand at room temperature to mimic the equivalent period of transit for patient samples, before being processed for CD4⁺ T cell extraction and subsequent downstream RNA/DNA applications using identical protocols to those of the patient participants.

[0173] CD4⁺ T Cell Isolation

[0174] CD4⁺ T cells were isolated from 27 ml of whole blood drawn into three 9 ml ethylenediaminetetraacetic acid (EDTA) tubes following the protocol of Pratt (2011). Briefly, monocytes were first depleted by the use of an anti-CD36/anti-glycophorim A cross-linking reagent (Rosettesep human monocyte depletion cocktail) that crosslinks monocytes to erythrocytes forming immunorosettes, which were separated by centrifugation after the addition of the erythrocyte aggregation agent HetaSep®. The supernatant was then collected and the remaining CD4⁺ T cells were positively selected by automated anti-CD4 antibody-based magnetic isolation (Easisep® whole blood CD4⁺ selection kit and Robosep® automated cell separator). By the prior removal of CD4′° expressing monocytes this extraction method is able to obtain CD4⁺ T cell purities of over 98%, compared to approximately 90% for single step column-based immunoprecipitation methods (Pratt et al., 2012). After cell counting (see below), 2×10⁵ cells were transferred to a single well of a 96-well V-bottom plate for flow cytometry processing (see below).

[0175] CD4⁺ T Cell Lysis

[0176] Purified CD4⁺ T cell isolates were transferred to 30 ml universal tube and washed by addition of cold (4° C.) calcium- and magnesium-free Hanks balanced salt solution (HBSS)+1% foetal calf serum (FCS) to a total volume of 25 ml. The tube was then centrifuged at 400 g for 7 minutes at 4° C., after which the supernatant was removed by aspiration using a vacuum-driven glass pipette. In an RNase-free open workbench area, the pellet was then resuspended in cold (4° C.) Qiagen Buffer RLT Plus+1% β-mercaptoethanol dependent on the number of T cells to be lysed; if <5 million cells then 350 μL of Buffer/β-mercaptoethanol was added, whereas if 25 million cells then 600 μL of Buffer/β-mercaptoethanol was added (in line with the manufacturer's protocol). The suspension was thoroughly mixed by pipetting and vortexing before transfer to a QIA-shredder column. Lysis of the T cells was completed by centrifugation of the column at 13,000 g for 2 minutes, and the lysate was then stored at −80° C.

[0177] Peripheral Blood Mononuclear Cell Isolation

[0178] PBMCs were isolated from 18 ml of whole blood drawn into two 9 ml EDTA tubes. The blood was diluted in HBSS+2 mM EDTA to a total volume of 40 ml. The diluted blood was then split to two 20 ml volumes that were layered by slow pipetting above 15 ml of Lymphoprep® within a 50 ml centrifuge tube. The layered tubes were then centrifuged at 895 g for 30 minutes with minimal acceleration and deceleration speeds to maintain layering of the sample. After centrifugation, PBMCs were removed from the interface layer using a Pasteur pipette and transferred to a fresh 50 ml centrifuge tube. The PBMCs were then immediately washed in cold (4° C.) HBSS+1% FCS to a total volume of 50 ml and centrifuged at 600 g for 7 minutes at 4° C. to remove any residual Lymphoprep®. The supernatant was discarded, and the pellet resuspended in 50 ml of cold (4° C.) HBSS+1% FCS before centrifuging at 250 g for 7 minutes at 4° C. to remove any platelets. The supernatant was discarded, and the pellet resuspended in 7 ml of cold (4° C.) HBSS+1% FCS and strained through a 70 μm nylon filter to a new 50 ml centrifuge tube (to exclude clumped cells), which was kept on ice for immediate cell counting. After cell counting, 2×10⁵ cells were transferred to a well of a 96-well V-bottom plate and stored at 4° C.

[0179] Serum Separation

[0180] Blood drawn in to a single 8 ml serum separator clot activator tube was centrifuged at 1,800 g for 12 minutes. The supernatant (i.e. serum) was then carefully removed by pipetting and divided to 1 ml aliquots, and frozen at −80° C.

[0181] Cell Counting

[0182] PBMCs and CD4⁺ T cells were counted within 10 μL of diluted sample placed underneath a cover slip mounted upon a Bürker haemocytometer chamber. The number of cells within 25 squares was then manually counted using alight microscope. The total number of cells present in the sample was calculated as per the Formula below:

calculation of cell number by Bürker haemocytometer chamber counting: Total cells=[volume (ml)]×[dilution factor]×[number of cells in 25 squares]×10⁴

[0183] CD4⁺ Purity Check by Flow Cytometry

[0184] Unfixed samples of PBMCs and CD4⁺ T cells stored in 96-well V-bottom plates at 4° C. were stained and analysed by flow cytometry within 18 hours of sample isolation. Firstly, the plate was centrifuged at 400 g for 3 minutes and the supernatant removed by flicking. Cells were then resuspended in 50 μL of flow cytometry antibody mixture by thorough pipetting and incubated in the dark for 30 minutes at 4° C. After this, 100 μL of flow cytometry buffer was added to each well and the plate then centrifuged at 400 g for 3 minutes. After removal of the supernatant by flicking, the stained cells were then resuspended in 150 μL of flow cytometry buffer and the plate centrifuged at 400 g for 3 minutes. After removal of the supernatant by flicking, the cells were resuspended in 200 μL of flow cytometry buffer and transferred to individual cytometry tubes. Flow cytometry data was recorded using a FACSCanto-II cytometer and FACSDiva software (Becton Dickinson Biosciences, San Jose, Calif., USA). Analysis of flow cytometry data was performed using FlowJo software (FlowJo LLC Data Analysis Software, Ashland, Oreg., USA). PBMC samples were first gated on side-scatter area (SSC-A) and width (SSC-W) to identify singlets, which were then gated on SSC-A and forward-scatter area (FSC-A) to exclude debris. The resulting population was then gated on compensated CD3 and compensated CD4 to identify CD3⁺CD4⁺ T cells, SSC-A and compensated CD14 to identify CD14⁺ monocytes, and SSC-A and compensated CD19 to identify CD19′ B-cells. These gates were then applied to the CD4⁺ T cell isolate matched to the individual patient where available to assess purity.

[0185] CD4⁺ T Cell RNA Extraction

[0186] Frozen CD4⁺ T cell lysates (see above) were thawed at room temperature in an RNase-free open workbench area. Thawed lysates were mixed by pipetting and transferred to RNase-free conical-bottom 2 ml microcentrifuge tubes. In order to remove residual magnetic nanoparticles remaining from the CD4⁺ T cell isolation procedure, the lysates were centrifuged at maximum speed (13000 rpm) for 2 minutes. The supernatant was then carefully removed using a P1000 pipette (taking care not to disturb the pellet of magnetic nanoparticles at the bottom of the tube) and transferred to a Qiagen AllPrep DNA Mini spin column placed within a 2 ml collection tube.

[0187] The sample was then centrifuged at maximum speed (13000 rpm) for 30 seconds

[0188] The collection tube containing the flow-through from the DNA column was then processed according to the manufacturer's instructions, including on-column DNase digestion and all steps designated as ‘optional’ according to the manufacturer's instructions. Final purified RNA was eluted from the RNeasy Mini spin column using a volume of RNase-free water determined by total number of CD4⁺ T cells present in the initial sample (see above) as follows: 30 μL for <5×10⁶ cells, or 40 μL for 25×10⁸ cells. The amount of RNA present in each sample was then quantified using a NanoDrop™ ND1000 ultraviolet (UV) spectrophotometer (Thermo Fisher Scientific), with 2 μg of each sample (or the total sample if <2 μg) stored at −80° C. for RNA sequencing processing (see below).

[0189] Next-Generation RNA Sequencing (RNAseq)

[0190] The quantity and estimated RNA integrity (RINe) of RNA samples was measured by gel electrophoresis using a Tapestation™ 4200 machine (Agilent). Following quantification, 1.5 μg of total RNA per sample was used for RNAseq processing; where total RNA<1.5 μg, the entire sample was used. Total RNA was processed using the TruSeq™ Stranded mRNA Library Prep Kit (Illumina), according to the ‘High Sample Protocol’ section of the manufacturer's instructions. First, messenger RNA (mRNA) was enriched from the purified total RNA by poly-A selection using poly-T oligo attached magnetic beads in two rounds of purification. Enriched mRNA was then fragmented by heating with magnesium cations, and then incubated with reverse transcriptase to synthesise first strand cDNA for each sample. This step was performed in the presence of Actinomycin D to prevent DNA-dependent synthesis of a second strand. The mRNA was then degraded with RNase and second strand cDNA was then synthesised by incubation with DNA Polymerase I. Double-stranded cDNA was then isolated using solid phase reversible immobilisation (SPRI) paramagnetic beads (Agencourt™ AMPure™ XP beads, Beckman Coulter Genomics), after which the 3′ ends were adenylated to facilitate sequencing adaptor binding. The Illumina sequencing adaptors contained three key functional elements: an amplification element required for amplification of the cDNA by polymerase chain reaction, a sequencing element required for the sequencing reaction, and a unique index element to allow identification of each individual patient sample. cDNA that had successfully ligated with adaptors was selectively amplified by poymerase chain reaction. Amplified cDNA was then diluted to equimolar concentrations and pooled before sequencing.

[0191] RNA sequencing was performed using an Illumina NextSeg™ 500 in high-output mode. This configuration delivered 400 million reads over 75 cycles for 40 samples loaded across 4 lanes per flow cell. Sequencing was performed in batches across 4 separate flow cell sequencing runs. Samples were allocated to sequencing batches such that computational correction for any batch-to-batch variation at the level of either the RNA extraction (6 batches) or RNA sequencing (4 batches) could be achieved, according to a predetermined experimental design using the duplicate correlation command of the ‘limma’ Bioconductor/R package (v3.32.5) (Ritchie et al., 2015). Using this approach, it was possible to sequence all 136 CD4⁺ T cell samples to a depth of 10 million reads per sample, with 75 bp single-end reads.

[0192] Mutiplex Cytokne/Chemokine Electrochemiluminescence Assays

[0193] Previously separated serum samples stored at −80° C. (see above) were thawed at 37° C., mixed by vortexing and then centrifuged for 2 minutes at maximum speed (13000 rpm) to separate any contaminating debris. Serum was then transferred to 96-well V-PLEX™ plates (MesoScale Discovery) and processed according to the manufacturer's instructions. The volumes of sample loaded per well, together with the fold dilution and dilution method for each plate is detailed in the Table below, as specified by the manufacturer:

| | Sample | | |
|---|---|---|---|
| | volume | Fold | |
| V-PLEX ™ plate | (μL) | dilution | Dilution method |
| Cytokine panel 1 (human) | 25 | 2 | In-plate |
| Chemokine panel 1 | 12.5 | 4 | In-plate |
| (human) | | | |
| Proinflammatory panel 1 | 25 | 2 | In-plate |
| (human) | | | |
| Th17 panel 1 (human) | 12.5 | 4 | In-plate |
| Vascular injury panel 2 | 10 | 1000 | Three serial 10-fold |
| (human) | | | dilutions prior to |
| | | | addition to plate |

Volume, fold dilution and dilution method for samples according to V-PLEX ™ plate.

[0194] The assays included on each plate are detailed in the Table below:

| V-PLEX ™ plate | Assays | |
|---|---|---|
| Cytokine panel 1 (human) | GM-CSF | IL-15 |
| | IL-1α | IL-16 |
| | IL-5 | IL-17A |
| | IL-7 | TNF-β |
| | IL-12/23 p40 subunit | VEGF-A |
| Chemokine panel 1 (human) | Eotaxin (CCL11) | MlP-1α (CCL3) |
| | MIP-1β (CCL4) | IL-8(HA) |
| | Eotaxin-3 (CCL26) | MCP-1 (CCL2) |
| | TARC (CCL17) | MDC (CCL22) |
| | IP-10 (CXCL10) | MCP-4 (CCL13) |
| Proinflammatory panel 1 | IFN-γ | IL-8 |
| (human) | IL-1β | IL-10 |
| | IL-2 | IL-12p70 subunit |
| | IL-4 | IL-13 |
| | IL-6 | TNF-α |
| Th17 panel 1 (human) | IL-17A | IL-27 |
| | IL-21 | IL-31 |
| | IL-22 | MIP-3α (CCL20) |
| | IL-23 | |
| Vascular Injury panel 2 | SAA | VCAM-1 |
| (human) | hsCRP | ICAM-1 |

Cytokine and chemokine assays by V-PLEX ™ plate type. CCL: C-C motif chemokine ligand; CXCL: C-X-C motif chemokine ligand; GM-CSF: granulocyte-macrophage colony-stimulating factor; hsCRP: high-sensitivity C-reactive protein; ICAM: intercellular adhesion molecule; IFN: interferon; IL: interleukin; MCP: monocyte chemoattractant protein; MDC: macrophage-derived chemokine; MIP: macrophage inhibitory protein; IP-10: interferon-γ induced protein 10 kDa; SAA: serum amyloid A; TARC: thymus and activation-regulated chemokine; TNF: tumour necrosis factor; VCAM: vascular cell adhesion molecule; VEGF: vascular endothelial growth factor.

[0195] Owing to their large number, samples were processed across pairs of each plate type. Each pair of plates was processed on the same day to minimise variation between plates for each set of analytes. Although V-PLEX™ plates are specifically designed and certified to have minimal variation in assay performance between separate plates of the same lot number, additional steps were taken to minimise any potential for plate-to-plate variation to affect data analysis. First, for each plate pair, all baseline samples were included together on the same individual plate. This allowed for comparison of baseline samples between patients independent of any effect of plate-to-plate variation. Secondly, it was ensured that all samples from each individual patient were included together on the same individual plate. This allowed for comparison between study time points at the level of each individual patient independent of any effect of plate-to-plate variation in absolute quantification.

[0196] Following processing, plates were immediately analysed by electrochemiluminescence (ECL) using a MESO™ QuickPlex SQ120 (Meso Scale Diagnostics, LLC.) according to the manufacturer's instructions. Signal—concentration curves based on serial dilutions of a known supplied standard were generated for each assay to calculate the concentration of analytes in each sample using the Discovery Workbench™ software version 4.0 (Meso Scale Diagnostics, LLC.). For each assay, the upper limit of detection (ULOD) for was defined as the concentration of the highest calibrator, and the lower limit of detection (LLOD) was defined as 2.5×standard deviation above the lowest calibrator concentration. Analytes with an ECL signal corresponding to a calculated concentration above the ULOD were assigned a calculated concentration equal to the ULOD. Analytes with an ECL signal corresponding to calculated concentration below the LLOD were assigned a calculated concentration equal to the LLOD. Where a sample was duplicated on the same plate (for internal quality control purposes), the mean calculated concentration value was used for analysis.

[0197] Data Analysis

[0198] Analyses were performed according to the structure detailed below. All Cox regression models used Breslow approximation for handling of tied survival times (Themeau, 2015).
[0199] 1. The quality of data was assessed, and where necessary, low quality data was excluded.
[0200] 2. The distributions of data were summarised by descriptive statistics and, for continuous data, were visualised by standard methods including boxplots, Q-Q plots and histograms.
[0201] 3. Where the distributions of data were skewed, appropriate transformations of data groups was performed (e.g. natural logarithmic transformation).
[0202] 4. The association of each individual variable at baseline with time-to-flare was assessed by univariate Cox regression using the ‘survival’ package.
[0203] 5. Baseline variables were selected based on their univariate p-value to be taken forward to a multivariate Cox regression model. For clinical and cytokine data, an elevated significance threshold (p<0.2) was used in order to reduce the risk of type II error at this preliminary stage, in keeping with established precedent (Dales and Ury, 1978: Mickey and Greenland, 1989). In comparison, a more stringent significance threshold (p<0.001) was utilised for RNAseq univariate analysis in reflection of the several log-fold greater number of variables analysed.
[0204] 6. Backward stepwise variable selection based on the Akaike information criterion (AIC) using the ‘stepAIC’ function of the ‘MASS’ package was used to create a stepwise multivariate Cox regression model. The regression coefficient (equivalent to the natural logarithm of the hazard ratio) and its corresponding 95% confidence interval for each variable was visualised in a forest plot format using the package ‘forestplot’ (and its dependent packages ‘checkmate’ and ‘magrittr’).
[0205] 7. Patients were dichotomised by the levels of variables measured at baseline. In the case of binary variables, patients were dichotomised simply by presence or absence of the variable at baseline. For continuous variables, thresholds were determined by receiver operating characteristic (ROC) analysis (using the ‘pROC’ package). For each continuous variable, two optimum thresholds were set to optimise negative predictive value (NPV) and positive predictive value (PPV) for flare, corresponding to biomarker thresholds for remission and flare respectively. Confidence intervals for these metrics and the area under the ROC curve (ROC_{AUC}) were calculated by bootstrapping (2000 replicates) and the DeLong procedure (DeLong et al., 1988) respectively.
[0206] 8. Variables that were significantly associated with time-to-flare in the stepwise multivariate Cox regression model at the p<0.05 threshold were then combined in composite scores, weighted by their respective coefficients in multivariate Cox regression analysis.
[0207] 9. Survival curves were compared between the dichotomised groups (using the ‘survminer’, and its dependent ‘ggpubr’ and ‘ggplot2’, packages) by the log-rank test as a measure of their utility in predicting time-to-flare after DMARD cessation.
[0208] 10. Finally, where data allowed, the relationship between longitudinal changes in variables at the individual patient level and time-to-flare were explored.

[0209] A key assumption of Cox regression is that the hazard function for each stratum of the dataset is proportional over time—in other words, the proportional change in hazard attributable to a given variable must be constant across all time points. In a seminal paper, Schoenfeld defined residuals of the proportional hazards model that, if proportionality of hazards is true, show no significant correlation with time (Schoenfeld, 1982). Following this approach, proportionality of hazards was tested for each individual variable in univariate and stepwise multivariate Cox regression models by plotting scaled Schoenfeld residuals against time, and fitting a smoothed spline curve with four degrees of freedom using the survival package (Themeau, 2015). Proportionality of hazards was assumed if no significant association at the 0.05 threshold was observed between scaled Schoenfeld residuals versus time.

[0210] The Akaike information criterion (AIC) was used to drive stepwise backwards selection of variables in the multivariate Cox regression models. The AIC is a well-established method of nested model selection, which penalises goodness of model fit by the number of variables contained within the model (Bozdogan, 1987). The best model, displaying the optimum balance between predictive utility and number of variables, is distinguished by the lowest AIC score. In backwards stepwise selection, a set of reduced models is created by dropping each of variables in turn from the starting model. The model with the lowest AIC is then taken forward to the next round of variable selection, and the process repeated until no further reduction in AIC is possible—the model with the lowest AIC in the final step is accepted as the final stepwise model. Stepwise backwards variable selection of Cox regression models based on AIC has been previously described in analyses of differential gene expression in cancer studies, using both microarray technology (Wozniak et al., 2013) and next-generation sequencing data (Falco et al., 2016; Fan and Uu, 2016).

### Example 2—Clinical Data Results

[0211] Baseline clinical variables that are predictive of sustained DFR versus flare following DMARD cessation are identified herein.

[0212] Patient Recruitment and Outcomes

[0213] Of the 44 patients who discontinued DMARD therapy, 23 (52%) were classified as experiencing an arthritis flare, 20 (45%) maintained DFR and 1 (2%) was effectively lost to follow-up and was analysed as being censored in remission after 69 days follow-up (FIG. 2).

[0214] Survival Analysis

[0215] The association between baseline clinical variables and time to flare following DMARD cessation was analysed by univariate Cox regression for all 44 patients who stopped DMARDs (see Table below).

| | | | | Univar- |
|---|---|---|---|---|
| | | | 95% CI | iate |
| Variable | B | HR_{flare} | HR_{flare} | p-value |
| Double seropositive | 0.982 | 2.67 | 1.17-6.09 | 0.019 |
| Symptom duration prior to | 0.036 | 1.04 | 1.00-1.07 | 0.032 |
| first rheumatology review | | | | |
| (months) | | | | |
| Current number of DMARDs | 0.704 | 2.02 | 1.06-3.86 | 0.033 |
| Cumulative number of | 0.401 | 1.49 | 0.98-2.27 | 0.060 |
| DMARDs since diagnosis | | | | |
| Months since last change in | −0.015 | 0.98 | 0.97-1.00 | 0.067 |
| DMARD therapy | | | | |
| Male sex | 0.763 | 2.14 | 0.93-4.96 | 0.075 |
| ACPA positive | 0.752 | 2.12 | 0.90-5.01 | 0.087 |
| Current hydroxychloroquine | 0.752 | 2.12 | 0.89-5.04 | 0.089 |
| Baseline ACR/EULAR | −0.692 | 0.50 | 0.22-1.14 | 0.098 |
| Boolean remission | | | | |
| Baseline VASₚₐₜᵢₑₙₜ | 0.032 | 1.03 | 0.99-1.07 | 0.100 |
| RhF positive | 0.698 | 2.01 | 0.85-4.77 | 0.113 |
| Months from first | 0.007 | 1.01 | 1.00-1.02 | 0.141 |
| rheumatology review to | | | | |
| starting first DMARD | | | | |
| Current methotrexate | 1.422 | 4.14 | 0.56-30.84 | 0.165 |
| Weekly alcohol unit intake | 0.033 | 1.03 | 0.99-1.08 | 0.167 |
| Disease duration (years) | 0.034 | 1.03 | 0.99-1.09 | 0.172 |
| Baseline 28 TJC | −0.700 | 0.50 | 0.16-1.53 | 0.222 |
| Either RhF or ACPA positive | 0.612 | 1.84 | 0.68-4.99 | 0.229 |
| Months since last steroid | −0.011 | 0.99 | 0.97-1.01 | 0.252 |
| Ever smoker | −0.405 | 0.67 | 0.29-1.52 | 0.334 |
| Baseline DAS28-ESR | 0.579 | 1.79 | 0.42-7.67 | 0.436 |
| remission | | | | |
| Baseline CRP (mg/L) | 0.055 | 1.06 | 0.92-1.21 | 0.440 |
| Baseline HAQ-DI | −0.295 | 0.74 | 0.32-1.74 | 0.495 |
| Baseline ESR (mm/hr) | 0.009 | 1.01 | 0.98-1.04 | 0.526 |
| Age (years) | 0.011 | 1.01 | 0.97-1.05 | 0.569 |
| Current smoker | −0.314 | 0.73 | 0.17-3.12 | 0.671 |
| Current sulfasalazine | −0.109 | 0.90 | 0.35-2.28 | 0.819 |
| Baseline DAS28-CRP | 0.080 | 1.08 | 0.45-2.60 | 0.858 |
| Baseline 28 SJC | 0.049 | 1.05 | 0.54-2.02 | 0.885 |
| Baseline DAS28-ESR | 0.019 | 1.02 | 0.63-1.64 | 0.938 |

Association of clinical variables with occurrence of arthritis flare following DMARD cessation by univariate Cox regression. For continuous variables, hazard ratios (HR) and the Cox regression coefficients (B) are presented for a 1 unit change in that variable. P values calculated by the Wald test. HCQ: hydroxychloroquine; MTX: methotrexate; SFZ: sulfasalazine.

[0216] Proportionality of hazards was assessed for each univariate variable by correlation of scaled Schoenfeld residuals with transformed flare-free survival time (see methods above). No significant departure from proportional hazards was observed for any of the variables.

[0217] The 15 variables with a univariate value <0.2 were then entered simultaneously in a multivariate Cox regression model. Stepwise backward selection based on AIC was then performed using the same variables to fit a stepwise Cox regression model. After 6 rounds of selection, variables remained in this stepwise model (see Table below).

| Variable | B | HR_{flare} | 95% CI | p value |
|---|---|---|---|---|
| Months from first rheumatology | 0.034 | 1.03 | 1.01-1.06 | 0.008 |
| review to starting first DMARD | | | | |
| RhF positive | 1.629 | 5.10 | 1.48-17.6 | 0.010 |
| ACPA positive | 1.589 | 4.90 | 1.36-17.7 | 0.015 |
| Baseline ACR/EULAR Boolean | −1.126 | 0.32 | 0.12-0.90 | 0.031 |
| remission | | | | |
| Current methotrexate | 2.435 | 11.41 | 1.25-104 | 0.031 |
| Months since last change in | −0.025 | 0.98 | 0.95-1.00 | 0.034 |
| DMARD therapy | | | | |
| Disease duration (years) | −0.127 | 0.88 | 0.76-1.02 | 0.092 |
| Male sex | 0.975 | 2.65 | 0.80-8.73 | 0.109 |
| Symptom duration prior to first | 0.042 | 1.04 | 0.98-1.11 | 0.158 |
| rheumatology review (months) | | | | |

Association of clinical variables with occurrence of arthritis flare following DMARD cessation, using a backwards stepwise multivariate Cox regression model. For continuous variables, hazard ratios and the Cox regression coefficients (B) are presented for a 1 unit change in that variable. P values calculated by the Wald test.

[0218] Proportionality of hazards was again assessed for each variable in the final stepwise multivariate Cox regression model. A significant departure from proportional hazards was observed only for current methotrexate use (p=0.04), though this was only notable for a single outlier with no discernible trend in the remainder of the data. The global Schoenfeld test was non-significant (p=0.49), indicating proportionality of hazards for the model as a whole.

[0219] Four variables were associated with shorter time-to-flare at the 5% significance level, namely: ACPA positivity. RhF positivity, current methotrexate and time from diagnosis to commencement of first DMARD. In contrast, fulfilment of ACR/EULAR Boolean remission criteria and time since last change in DMARD therapy were associated with a longer time-to-flare.

[0220] Composite Clinical Biomarker Score

[0221] Values of the six variables that were significantly (p<0.05) associated with time-to-flare at in the multivariate stepwise Cox regression model were multiplied by their respective coefficients in the model and then summed to create composite scores. The predictive value of all 63 possible combinations of these variables to predict flare and remission following DMARD cessation was then compared by area under the receiver-operating characteristic curve (ROC_{AUC}). The ten composite scores with the highest ROC_{AUC} are listed in the Table below.

| | | ACR/EULAR | DMARD | | DMARD | |
|---|---|---|---|---|---|---|
| RhF | ACPA | Boolean | change | Current | commencement | |
| positive | positive | remission | (months) | methotrexate | (months) | ROC_{AUC} |
| x | ✓ | ✓ | ✓ | ✓ | X | 0.850 |
| ✓ | ✓ | ✓ | ✓ | ✓ | X | 0.848 |
| x | X | ✓ | ✓ | ✓ | X | 0.837 |
| ✓ | X | ✓ | ✓ | ✓ | X | 0.833 |
| ✓ | ✓ | ✓ | ✓ | ✓ | ✓ | 0.805 |
| X | ✓ | ✓ | ✓ | ✓ | ✓ | 0.798 |
| X | ✓ | X | ✓ | ✓ | x | 0.787 |
| ✓ | X | X | ✓ | ✓ | x | 0.786 |
| ✓ | X | ✓ | ✓ | ✓ | ✓ | 0.782 |
| ✓ | ✓ | ✓ | ✓ | x | ✓ | 0.777 |

The top ten clinical composite scores ranked by ROC_{AUC}. Variables included within each score are indicated in green, and those excluded are indicated in red.

[0222] Optimal performance was observed for a four-variable composite score incorporating ACPA positivity. ACR/EULAR Boolean remission, time since last change in DMARD therapy, and current use of methotrexate (Formula below).
[0223] Formula—Composite clinical biomarker score. Values for binary variables, as indicated by the square brackets, are only added to the equation if the variable is present.

Clinical score=0.654[ACPA positive]+1.130[current methotrexate]-0.521[ACR/EULAR Boolean remission]−0.012(months since last DMARD change)

[0224] The composite clinical score performed well its ability to discriminate flare versus remission following DMARD cessation, with a total area under the ROC curve (ROC_{AUC}) of 0.85 (95% Cl 0.73-0.97). Optimal thresholds were determined to maximise detection of flare (1.82) and remission (0.51). Both thresholds performed well in the study population, with a positive predictive value (PPV) of 0.90 (95% Cl 0.78-1.00) for the flare threshold, and a negative predictive value (NPV) of 0.87 (95% Cl 0.69-1.00) for the remission threshold (Table below).

| Positive test | | | | |
|---|---|---|---|---|
| threshold | Sensitivity | Specificity | PPV | NPV |
| Flare | 0.78 | 0.90 | 0.90 | 0.78 |
| (>1.82) | (0.61-0.91) | (0.75-1.00) | (0.78-1.00) | (0.67-0.91) |
| Remission | 0.91 | 0.60 | 0.72 | 0.87 |
| (>0.51) | (0.78-1.00) | (0.40-0.80) | (0.62-0.85) | (0.69-1.00) |

Predictive utility of the clinical composite clinical score in predicting flare following DMARD cessation, with a positive test defined by either flare or remission thresholds. NPV: negative predictive value; PPV: positive predictive value.

[0225] Baseline Predictors of Drug-Free Remission

[0226] Of the six variables significantly associated with time-to-flare in the multivariate stepwise Cox regression model, four had discriminatory value in a composite score for predicting flare and remission in the six months after DMARD cessation. ACPA and RhF positivity were predictive of increased likelihood of flare; and ACR/EULAR Boolean remission and months since last DMARD change were predictive of increased likelihood of remission.

[0227] ACR/EULAR Boolean Remission

[0228] A notable finding of this study is that fulfilment of ACR/EULAR Boolean remission at baseline is associated with a 3-fold lower risk of arthritis flare in the six months following DMARD cessation. Given the relatively new introduction of this remission definition, data surrounding its utility in the prediction of DFR following DMARD cessation remains scarce. The only study to have previously addressed this issue is the RETRO study, which demonstrated only a non-significant trend towards lower flare rate in those satisfying ACR/EULAR Boolean remission (OR_{flare} 0.673, 95% Cl 0.211-2.144, p=0.503) (Haschka et al., 2016).

[0229] Any of the individual components that constitute ACR/EULAR Boolean remission failed to demonstrate a significant association with time-to-flare in the multivariate analysis, suggesting that it is the combination of variables within the definition that is of importance. Although not designed specifically for clinical use, a major limitation of the use of ACR/EULAR Boolean remission in clinical practice lies in its stringent VASₚₐₜᵢₑₙₜ≤ 1/10 threshold. Indeed, 10/74 (15%) of patients recruited to this study satisfied DAS28-CRP remission at baseline yet failed to achieve ACR/EULAR remission solely on grounds of VASₚₐₜᵢₑₙₜ alone (median 22/100, range 12-34). A modified Boolean remission criteria incorporating a higher VAS patient threshold (for example ≤20/100) may have greater specificity for flare without losing sensitivity.

### SUMMARY

[0230] ACR/EULAR Boolean remission is negatively associated with flare, suggesting a robust and stable clinical remission phenotype at baseline in those patients who subsequently achieved sustained drug-free remission.

### Example 3—Cytokine Results

[0231] The measurement of circulating chemokines and cytokines provides an attractive approach to the development of biomarkers of DFR in RA. Suitable biological samples (serum or plasma) can be obtained with simple venepuncture and require only a single centrifugation step before suitable for long-term freezer storage. Furthermore, many laboratory assays for the sensitive and specific detection of a wide range of human cytokines are already in widespread research and clinical use. A robust serum-based circulating cytokine/chemokine biomarker of DFR would thus be ideally placed for translation to a high-throughput assay suitable for use in clinical practice.

[0232] Surprisingly little research has been conducted to date that explores circulating serum predictors of DFR in RA beyond acute-phase markers. Nevertheless, available tools such as the multi-biomarker disease activity (MBDA) assay have been developed for the measurement of disease activity. It is possible that such measures could overlook more nuanced mediators that are not directly involved in the acute phase response, but nonetheless play crucial roles maintaining the balance between sustained DFR and arthritis flare.

[0233] Cytokine/chemokine biomarkers are identified herein that, when measured immediately prior to DMARD cessation, differentiate those patients who subsequently developed arthritis flare versus those who remained in sustained DFR. The longitudinal change in circulating cytokine/chemokine profile in both flare and remission groups are also explored, providing insights to the underlying immunobiology of flare and DFR.

[0234] Quality Control

[0235] In this study, commercially available multiplex electrochemiluminescence assays (MesoScale Discovery) were used for the detection of 39 chemokines and cytokines (see methods above). These kits benefit from both a highly specific antibody-based capture mechanism, together with robust quality control mechanisms to ensure reliable assay performance.

[0236] Sample Collection

[0237] Of the 44 patients who stopped DMARDs, baseline samples from 43 patients were available for analysis. Serum was available for 29/42 month one visits and for 15/19 patient-requested unscheduled visits. Serum was collected for all month 3 and month 6 visits. Serum was available at the time of flare for 22/23 patients who experienced an arthritis flare.

[0238] Time from blood draw to centrifugation was recorded for 133/136 serum samples collected, with a median value of 50 (IQR: 43-87, range: 30-210) minutes.

[0239] Calibrator Coefficient of Variation

[0240] Seven manufacturer-supplied calibrator solutions containing known concentrations of analytes were prepared by serial dilution for each plate. This allowed calculation of the percentage coefficient of variation (% CV) of calculated concentration for each calibrator on each plate (Appendix G). The manufacturer states that the % CV is typically less than 20% for repeat measurements. Over the 10 individual plates there were 656 pairs of calibrator measurements, of which % CV>20 in 60 (9%) of measurement pairs. Of these measurement pairs, 37/60 (62%) were within the three lowest concentration calibrators.

[0241] Limits of Detection

[0242] A total of 6324 assay measurements (excluding calibrators and blanks) were recorded over the 10 plates. Upper and lower limits of detection (ULOD and LLOD respectively) were calculated for each assay as previously described (see methods above). No samples exceeded the ULOD, whereas 3391 (54%) had a calculated concentration below the LLOD.

[0243] Samples where the calculated concentration fell below the LLOD were assigned a calculated concentration equal to the LLOD for each respective assay.

[0244] Two IL-8 assays were included with differing ranges of detection: standard IL-8 assay and an alternative IL-8 assay (IL-8 (HA)) with a higher detection range. Concentration measurements frequently fell below the limits of detection for the IL-8 (HA) assay, and thus results from the standard IL-8 assay were used for analysis. Similarly, two IL-17A assays were included based on different isotypes of detection antibody. A greater proportion of assays fell below the LLOD for the IL-17A assay on the Th17 panel plates in comparison to the IL-17A assay on the cytokine panel plates, and thus the former was excluded from analysis.

[0245] For analyses based solely on baseline samples, 13 assays where <20% of measurements were above the LLOD were excluded. For longitudinal analysis of flare patients, six assays where all measurements were below the LLOD at both baseline and time of flare were excluded. For longitudinal analysis of remission patients, eight assays where all measurements were below the LLOD at both baseline and month six visit were excluded. The assays included within each analysis following the above quality control steps are summarised in the Table below.

| | | Inclusion of assay by analysis type | | |
|---|---|---|---|---|
| | | | Baseline to | Baseline to |
| | | Baseline | flare visit | month six visit |
| | | (all | (flare | (remission |
| MSD plate | Assay | patients) | patients) | patients) |
| Cytokine | GM-CSF | X | X | X |
| panel 1 (human) | IL-12/IL- | ✓ | ✓ | ✓ |
| | 23p40 | | | |
| | subunit | | | |
| | IL-15 | ✓ | ✓ | ✓ |
| | IL-16 | ✓ | ✓ | ✓ |
| | IL-17A | X | ✓ | ✓ |
| | IL-1α | X | ✓ | ✓ |
| | IL-5 | X | ✓ | ✓ |
| | IL-7 | ✓ | ✓ | ✓ |
| | TNF-β | X | X | ✓ |
| | VEGF | ✓ | ✓ | ✓ |
| Chemokine | Eotaxin | ✓ | ✓ | ✓ |
| panel 1 (human) | Eotaxin-3 | ✓ | ✓ | ✓ |
| | IL-8(HA) | X | X | X |
| | IP-10 | ✓ | ✓ | ✓ |
| | MCP-1 | ✓ | ✓ | ✓ |
| | MCP-4 | ✓ | ✓ | ✓ |
| | MDC | ✓ | ✓ | ✓ |
| | MIP-1α | ✓ | ✓ | ✓ |
| | MIP-1β | ✓ | ✓ | ✓ |
| | TARC | ✓ | ✓ | ✓ |
| Proinflammatory | IFN-γ | ✓ | ✓ | ✓ |
| panel 1 (human) | IL-10 | ✓ | ✓ | ✓ |
| | IL-12p70 | X | X | X |
| | subunit | | | |
| | IL-13 | X | ✓ | X |
| | IL-1β | X | ✓ | X |
| | IL-2 | X | ✓ | ✓ |
| | IL-4 | X | ✓ | X |
| | IL-6 | ✓ | ✓ | ✓ |
| | IL-8 | ✓ | ✓ | ✓ |
| | TNF-α | ✓ | ✓ | ✓ |
| Th17 panel 1 | IL-17A | X | X | X |
| (human) | IL-21 | X | X | X |
| | IL-22 | ✓ | ✓ | ✓ |
| | IL-23 | X | X | X |
| | IL-27 | ✓ | ✓ | ✓ |
| | MIP-3α | ✓ | ✓ | ✓ |
| | IL-31 | X | X | X |
| Vascular injury | CRP | ✓ | ✓ | ✓ |
| panel 2 (human) | ICAM-1 | ✓ | ✓ | ✓ |
| | SAA | ✓ | ✓ | ✓ |
| | VCAM-1 | ✓ | ✓ | ✓ |

Inclusion of assays by type of analysis.

[0246] Logarithmic Data Transformation

[0247] The distribution of calculated concentrations for each assay was typically positively skewed. To create a more even distribution of data, the natural logarithm of each analyte concentration measurement was calculated before further data analysis. A constant value (+1) was added to each analyte concentration before logarithmic transformation to allow for zero values.

[0248] Plate Equilibration

[0249] It was not possible to analyse all serum samples together on the same plate, as the total number of samples (136) exceeded the number of available wells (80) on a single plate. It was therefore necessary to process samples across pairs of each type of MSD plate. Each pair of plates was processed on the same day to minimise variation. Furthermore, all baseline samples were run together on the same plate within each plate pair, thus permitting analysis of baseline samples without any effect of plate-to-plate variation.

[0250] By replicating baseline samples where space allowed, it was attempted to keep all samples from the same participant together on the same single plate for the purposes of longitudinal analysis—however, this was not possible in all cases. Despite the manufacturer's claims of excellent reproducibility of assay performance between plates of identical lots, it was deemed necessary to apply a data equilibration procedure to minimise any potential effect upon longitudinal analyses. First, the relationship between the concentrations of each individual analyte for duplicated samples (i.e. present on both plates within a pair) was modelled by linear regression as detailed in the formula below:

linear regression equation for plate equilibration procedure: Plate₂ concentration=m*(plate₁ concentration)+c

[0251] The regression formula was then applied to each individual concentration measurement for each assay within each plate₂, thus equilibrating plate₂ with plate₁ measurements in each plate pair. Finally, to avoid any bias introduced by differing LLODs between plate pairs, the highest LLOD of either plate within each pair was applied for the purposes of longitudinal data analyses. Where a sample had been analysed on both plates, the sample measurement on the same plate as the majority of other samples for that patient was used for analysis to reduce further any bias introduced by plate-to-plate variation.

[0252] There were 11 assays where only two or fewer samples measured above the LLOD on both plates—these assays were thus excluded from plate equilibration, namely: GM-CSF, IL-1α, TNFβ, IL-12p70, IL-13, IL-1β, IL-2, IL-4, IL-21, IL-23 and IL-31. In addition, MIP1α concentration demonstrated a poor correlation between plates and was also excluded. Plate equilibration was not performed for these samples, but rather only concentrations from a single plate (i.e. excluding values from the other plate) at the level of each patient were used for analysis.

[0253] Baseline Survival Analysis

[0254] The association between baseline cytokine/chemokine levels and time-to-flare following DMARD cessation were analysed by univariate Cox regression (see Table below) for all 26 assays that passed quality control checks (see above). Proportionality of hazards was observed for all variables with the exception of ln(ICAM1+1).

| | | | | Univariate |
|---|---|---|---|---|
| Variable | B | HR_{flare} | HR_{flare} 95% CI | p value |
| ln(MCP1 + 1) | 2.212 | 9.13 | 1.97-42.32 | 0.005 |
| ln(CRP + 1) | 0.426 | 1.53 | 1.02-2.31 | 0.042 |
| ln(Eotaxin + 1) | 1.386 | 4.00 | 0.97-16.5 | 0.055 |
| ln(IL6 + 1) | 0.730 | 2.08 | 0.97-4.45 | 0.060 |
| ln(TNFa + 1) | 1.273 | 3.57 | 0.93-13.7 | 0.063 |
| ln(IP10 + 1) | 0.592 | 1.81 | 0.97-3.38 | 0.064 |
| ln(IL10 + 1) | 1.737 | 5.68 | 0.65-49.8 | 0.117 |
| ln(IL27 + 1) | 0.948 | 2.58 | 0.78-8.53 | 0.120 |
| ln(MCP4 + 1) | 0.522 | 1.69 | 0.84-3.38 | 0.140 |
| ln(IL15 + 1) | 1.572 | 4.82 | 0.56-41.6 | 0.153 |
| ln(Eotaxin3 + 1) | 0.310 | 1.36 | 0.81-2.28 | 0.238 |
| ln(VCAM1 + 1) | 0.654 | 1.92 | 0.55-6.72 | 0.306 |
| ln(IL16 + 1) | 0.694 | 2.00 | 0.52-7.65 | 0.311 |
| ln(IL7 + 1) | 0.628 | 1.87 | 0.51-6.84 | 0.342 |
| ln(IL22 + 1) | −0.502 | 0.61 | 0.20-1.87 | 0.384 |
| ln(MIP1a + 1) | −0.485 | 0.62 | 0.19-2.04 | 0.427 |
| ln(TARC + 1) | 0.283 | 1.33 | 0.64-2.76 | 0.448 |
| ln(MIP1b + 1) | 0.342 | 1.41 | 0.47-4.17 | 0.538 |
| ln(MDC + 1) | −0.376 | 0.69 | 0.15-3.07 | 0.623 |
| ln(IL8 + 1) | 0.171 | 1.19 | 0.55-2.57 | 0.664 |
| ln(IFNg + 1) | 0.074 | 1.08 | 0.73-1.59 | 0.712 |
| ln(VEGF + 1) | −0.043 | 0.96 | 0.46-1.99 | 0.909 |
| ln(MIP3a + 1) | 0.033 | 1.03 | 0.58-1.85 | 0.912 |
| ln(SAA + 1) | 0.017 | 1.02 | 0.66-1.56 | 0.940 |
| ln(ICAM1 + 1) | 0.033 | 1.03 | 0.34-3.15 | 0.954 |
| ln(IL1223p40 + 1) | 0.019 | 1.02 | 0.47-2.21 | 0.961 |

Association between the circulating concentration of cytokines/chemokines at baseline and time-to-flare following DMARD cessation, analysed by univariate Cox regression. Hazard ratios are calculated for a 1-unit change in log-transformed cytokine/chemokine concentration. B: Cox regression coefficient. P values calculated by the Wald test.

[0255] There was no statistical association between ln(ICAM1+1) and flare by univariate Cox regression (p=0.95). To confirm that this lack of association was not a spurious effect of poor survival modelling, the relationship between ln(ICAM1+1) and occurrence of flare was assessed by univariate binomial logistic regression, which also demonstrated a similar lack of association (OR_{flare} 0.66, 95% Cl 0.12-3.72, p=0.64).

[0256] Following univariate modelling, the 10 variables with a univariate p-value <0.2 were then entered to a multivariate Cox regression model, and stepwise backward variable selection based on AIC was performed. After seven rounds of selection, three variables remained in this stepwise model (Table below). Proportionality of hazards was confirmed for all three variables by the Schoenfeld residual test.

| Variable | B | HR_{flare} | 95% CI HR_{flare} | Multivariate p |
|---|---|---|---|---|
| ln(MCP1 + 1) | 2.320 | 10.2 | 2.01-51.4 | 0.005 |
| ln(IL27 + 1) | 1.464 | 4.32 | 1.17-16.0 | 0.029 |
| ln(CRP + 1) | 0.404 | 1.50 | 0.99-2.26 | 0.054 |

Association between the circulating concentration of cytokines/chemokines at baseline and time-to-flare following DMARD cessation, analysed in a backward stepwise multivariate Cox regression model. Hazard ratios are calculated for a 1-unit change in log-transformed cytokine/chemokine concentration. B: Cox regression coefficient. P values calculated by the Wald test.

[0257] The distributions of baseline ln(MCP1+1), ln(IL27+1) and ln(CRP+1) by flare status are summarised in FIG. 3. Baseline MCP1 levels were significantly higher at baseline in those patients who experienced an arthritis flare (p=0.012, unpaired Student's T-test). There was a trend towards higher baseline CRP and IL-27 in the flare group, though this was not statistically significant (p=0.121 and p=0.224 respectively).

[0258] ROC Analysis and Biomarker Thresholds

[0259] Patients were dichotomised based on their baseline levels of MCP1, IL-27 and CRP using two thresholds determined by ROC analysis optimised for the prediction of flare and remission, as discussed above. Variables were also combined to form composite scores, weighted by their respective coefficients from the stepwise multivariate Cox regression model (see Table below).

| | | | | Flare | |
|---|---|---|---|---|---|
| ln(MCP1 + | ln(IL27 + | ln(CRP + | Remission | thresh- | |
| 1) | 1) | 1) | threshold | old | ROC_{AUC} |
| ✓ | ✓ | ✓ | 29.31 | 30.54 | 0.757 |
| ✓ | ✓ | X | 23.01 | 24.695 | 0.746 |
| ✓ | X | ✓ | 18.17 | 19.29 | 0.725 |
| ✓ | X | X | 5.43 | 5.85 | 0.705 |
| X | ✓ | ✓ | 16.15 | 17.45 | 0.664 |
| X | X | ✓ | 13.68 | 14.51 | 0.654 |
| X | ✓ | X | 7.13 | 7.69 | 0.613 |

Cytokine/chemokine composite scores ranked by ROC_{AUC}. Variables included within each score are indicated in green, and those excluded are indicated in red.

[0260] Whereas MCP1 performed reasonably well in isolation, the discriminative value of IL-27 and CRP when used on their own was relatively poor. The best results were observed for composite measures, namely MCP1+CRP and MCP1+IL27, which performed best for the identification of future remission (FIG. 4) and flare (FIG. 5) respectively. A composite score encompassing all three variables did not yield any additional predictive value (see Table below).

| | ROC_{AUC} | | Sensitivity | Specificity | PPV | NPV |
|---|---|---|---|---|---|---|
| Variable | (95% CI) | Threshold | (95% CI) | (95% CI) | (95% CI) | (95% CI) |
| MCP1 + CRP | 0.73 | Flare | 0.52 | 0.84 | 0.80 | 0.59 |
| | (0.57-0.88) | (19.29) | (0.30-0.70) | (0.68-1.00) | (0.63-1.00) | (0.48-0.72) |
| | | Remission | 1.00 | 0.37 | 0.66 | 1.00 |
| | | (18.17) | (1.00-1.00) | (0.16-0.58) | (0.59-0.74) | (1.00-1.00) |
| MCP1 + IL27 | 0.75 | Flare | 0.43 | 1.00 | 1.00 | 0.59 |
| | (0.60-0.89) | (24.695) | (0.26-0.65) | (1.00-1.00) | (1.00-1.00) | (0.53-0.70) |
| | | Remission | 0.96 | 0.32 | 0.63 | 0.88 |
| | | (23.01) | (0.87-1.00) | (0.11-0.53) | (0.56-0.72) | (0.57-1.00) |
| MCP1 + IL27 + | 0.76 | Flare | 0.43 | 0.95 | 0.92 | 0.58 |
| CRP | (0.61-0.90) | (30.54) | (0.22-0.65) | (0.84-1.00) | (0.71-1.00) | (0.50-0.69) |
| | | Remission | 0.96 | 0.37 | 0.65 | 0.89 |
| | | (29.31) | (0.87-1.00) | (0.16-0.58) | (0.58-0.74) | (0.60-1.00) |

Predictive utility of cytokine/chemokine variables In predicting flare following DMARD cessation, with a positive test defined by either flare or remission thresholds. Optimum pairs of predictive metrics are highlighted in bold. NPV: negative predictive value; PPV: positive predictive value.

[0261] Sensitivity Analysis for Time to Centrifugation

[0262] Cytokines and chemokines are known to degrade in whole blood that has been left to stand for a prolonged period before centrifugation (Jackman et al., 2011). To assess whether this may have influenced the biomarker analysis, the three variables within the composite scores (i.e. ln(MCP1+1), ln(IL27+1) and ln(CRP+1)), and time from blood draw to centrifugation, were entered to a multivariate Cox regression model. In the three visits where centrifugation delay was not recorded, the median centrifugation delay across all visits was imputed. No significant association was observed between centrifugation delay (minutes) and arthritis flare (HR_{flare} 1.00, 95% Cl 0.99-1.00, p=0.465). Similar coefficients and statistical significance were observed for the three cytokine/chemokine variables as per the main analysis, demonstrating that their utility for predicting arthritis flare was not affected by inclusion of centrifugation delay within the model (see Table below). Proportionality of hazards was observed for all individual variables and the model as a whole.

| Variable | B | HR_{flare} | 95% CI | p |
|---|---|---|---|---|
| ln(MCP1 + 1) | 2.24 | 9.41 | 1.83-48.42 | 0.007 |
| ln(IL27 + 1) | 1.47 | 4.34 | 1.18-15.94 | 0.027 |
| ln(CRP + 1) | 0.37 | 1.45 | 0.97-2.18 | 0.070 |
| Centrifuge delay | 0.00 | 1.00 | 0.99-1.01 | 0.465 |
| (minutes) | | | | |

Sensitivity analysis incorporating time from blood draw to centrifugation within a multivariate Cox regression model. Hazard ratios are calculated for a 1-unit change in log-transformed cytokine/chemokine concentration, or for a 1 minute change in centrifugation delay.

[0263] Baseline to Flare Visit

[0264] Cytokine and chemokine levels were compared at baseline and flare visits in the 22 patients who both experienced a flare and had serum available at the time of flare. The statistical significance of differences between log-transformed cytokine/chemokine concentrations at baseline and flare visits was assessed by Student's paired T-test (see Table below). Four analytes demonstrated a >1.5 fold change in concentration at the 5% significance level after multiple-test correction using the Benjamini-Hochberg procedure: CRP, SAA, IL-6 and IP-10 (FIG. 6).

| | Number | Mean logₑ(FC) | | |
|---|---|---|---|---|
| | of | from baseline | Unadjusted | Adjusted |
| Variable | samples | to flare | p value | p value |
| ln(IL1223p40 + 1) | 20 | 0.206 | <0.001 | 0.008 |
| ln(CRP + 1) | 22 | 1.111 | <0.001 | 0.008 |
| ln(VEGF + 1) | 20 | 0.239 | 0.001 | 0.014 |
| ln(IL6 + 1) | 20 | 0.545 | 0.004 | 0.031 |
| ln(Eotaxin + 1) | 20 | −0.132 | 0.006 | 0.035 |
| ln(SAA + 1) | 22 | 1.071 | 0.006 | 0.035 |
| ln(IP10 + 1) | 20 | 0.447 | 0.010 | 0.043 |
| ln(IL15 + 1) | 20 | −0.095 | 0.010 | 0.043 |
| ln(MIP1α + 1) | 20 | 0.304 | 0.013 | 0.047 |
| ln(IL16 + 1) | 20 | 0.165 | 0.014 | 0.048 |
| ln(IL27 + 1) | 22 | 0.100 | 0.021 | 0.064 |
| ln(MDC + 1) | 20 | −0.066 | 0.024 | 0.067 |
| ln(Eotaxin3 + 1) | 20 | 0.248 | 0.032 | 0.082 |
| ln(ICAM1 + 1) | 22 | 0.192 | 0.081 | 0.190 |
| In(MIP3α + 1) | 22 | 0.204 | 0.108 | 0.238 |
| ln(IL1α + 1) | 20 | 0.168 | 0.124 | 0.256 |
| ln(VCAM1 + 1) | 22 | 0.077 | 0.173 | 0.336 |
| ln(IL5 + 1) | 20 | 0.034 | 0.194 | 0.356 |
| ln(TARC + 1) | 20 | −0.076 | 0.219 | 0.381 |
| ln(IL17A + 1) | 20 | 0.006 | 0.257 | 0.385 |
| ln(IL10 + 1) | 20 | 0.058 | 0.248 | 0.385 |
| ln(TNFα + 1) | 20 | 0.089 | 0.240 | 0.385 |
| ln(IL2 + 1) | 20 | −0.023 | 0.330 | 0.454 |
| ln(IL4 + 1) | 20 | 0.008 | 0.330 | 0.454 |
| ln(IL13 + 1) | 20 | −0.029 | 0.380 | 0.502 |
| ln(IL1β + 1) | 20 | 0.007 | 0.485 | 0.615 |
| ln(MCP1 + 1) | 20 | −0.024 | 0.594 | 0.726 |
| ln(IL7 + 1) | 20 | −0.022 | 0.654 | 0.771 |
| ln(MCP4 + 1) | 20 | 0.014 | 0.739 | 0.813 |
| ln(IFNγ + 1) | 20 | −0.105 | 0.732 | 0.813 |
| ln(MIP1β + 1) | 20 | −0.012 | 0.779 | 0.829 |
| ln(IL22 + 1) | 22 | 0.019 | 0.810 | 0.835 |
| ln(IL8 + 1) | 20 | 0.015 | 0.897 | 0.897 |

Change in cytokine/chemokine concentration from baseline to flare visits in those patients who experienced an arthritis flare following DMARD cessation. Statistical significance was assessed by Student's paired T-test, with multiple test-correction using the Benjamini-Hochberg procedure. FC: fold-change.

[0265] Baseline to Month Six Remission Visit

[0266] Cytokine and chemokine levels were compared at baseline and month six visits in the 19 patients who maintained DFR and had serum available at baseline and month six. The statistical significance of differences between log-transformed cytokine/chemokine concentrations at baseline and month six visits was assessed by Student's paired T-test (Table below). No analytes exceeded a >1.5 fold change in concentration at the 5% significance level (FIG. 6).

| | | Mean logₑ(fold | | |
|---|---|---|---|---|
| | Number | change) from | | |
| | of | baseline to | Unadjusted | Adjusted |
| Assay | samples | month 6 | p value | p value |
| ln(TNFα + 1) | 14 | 0.203 | 0.051 | 0.562 |
| ln(MCP1 + 1) | 14 | 0.088 | 0.064 | 0.562 |
| ln(IL15 + 1) | 14 | −0.074 | 0.077 | 0.562 |
| ln(IL1223p40 + 1) | 14 | 0.151 | 0.099 | 0.562 |
| ln(MIP3α + 1) | 19 | 0.208 | 0.100 | 0.562 |
| ln(IP10 + 1) | 14 | 0.284 | 0.121 | 0.562 |
| ln(TARC + 1) | 14 | −0.077 | 0.127 | 0.562 |
| ln(IL1α + 1) | 14 | −0.069 | 0.188 | 0.693 |
| ln(IFNγ + 1) | 14 | 0.276 | 0.216 | 0.693 |
| ln(IL5 + 1) | 14 | 0.029 | 0.259 | 0.693 |
| ln(IL10 + 1) | 14 | 0.019 | 0.260 | 0.693 |
| ln(IL7 + 1) | 14 | −0.066 | 0.294 | 0.693 |
| ln(IL27 + 1) | 19 | 0.039 | 0.309 | 0.693 |
| In(TNFβ + 1) | 14 | 0.001 | 0.336 | 0.693 |
| ln(IL2 + 1) | 14 | −0.013 | 0.336 | 0.693 |
| In(VEGF + 1) | 14 | 0.059 | 0.419 | 0.771 |
| ln(VCAM1 + 1) | 19 | 0.049 | 0.423 | 0.771 |
| ln(ICAM1 + 1) | 19 | 0.057 | 0.534 | 0.803 |
| ln(IL16 + 1) | 14 | −0.046 | 0.541 | 0.803 |
| ln(SAA + 1) | 19 | 0.116 | 0.542 | 0.803 |
| ln(IL17A + 1) | 14 | 0.013 | 0.544 | 0.803 |
| ln(MIP1β + 1) | 14 | 0.022 | 0.598 | 0.843 |
| ln(Eotaxin3 + 1) | 14 | 0.059 | 0.626 | 0.844 |
| ln(IL22 + 1) | 19 | 0.028 | 0.688 | 0.872 |
| ln(MDC + 1) | 14 | −0.017 | 0.704 | 0.872 |
| ln(IL6 + 1) | 14 | 0.003 | 0.768 | 0.912 |
| ln(MCP4 + 1) | 14 | 0.022 | 0.794 | 0.912 |
| ln(MIP1α + 1) | 14 | −0.018 | 0.862 | 0.955 |
| ln(IL8 + 1) | 14 | 0.010 | 0.929 | 0.988 |
| ln(CRP + 1) | 19 | 0.011 | 0.968 | 0.988 |
| ln(Eotaxin + 1) | 14 | −0.001 | 0.988 | 0.988 |

Change in cytokine/chemokine concentration from baseline to month six visits in those patients who remained in remission following DMARD cessation. Statistical significance was assessed by Student's paired T-test, with multiple test-correction using the Benjamini-Hochberg procedure.

[0267] Longitudinal Change in Selected Cytokines and Chemokines

[0268] The longitudinal change in circulating concentrations of selected cytokines and chemokines was explored across all study visits where serum samples were available for analysis. Descriptive analysis with the aid of longitudinal ‘spaghetti plots’ is presented herein (FIG. 7).

[0269] Both CRP and SAA concentrations rose in the approach towards arthritis flare, and remained essentially static for patients in remission, with the exception of two remission patients who had a concomitant urinary tract and lower respiratory tract infections respectively at the time of their month 3 study visit. IL6 concentrations abruptly rose at the time of flare, and remained static for patients in remission, although many samples fell below the plate-merged LLOD. Overall, IP10 concentrations rose higher in the flare versus remission group, though there was greater heterogeneity in the individual patient trends.

[0270] There was a modest overall increase in IL-27 from baseline to flare which was not observed in patients who remained in remission, although the individual patient trends were somewhat mixed. There were no clear longitudinal trends in MCP1, in contrast to its utility for predicting flare when measured at baseline.

[0271] Monocyte Chemoattractant Protein 1 (MCP-1/CCL2)

[0272] In this study, MCP-1 is predictive of outcome following DMARD cessation, with low levels at baseline demonstrating particular discrimination for those patients who maintained DFR. This observation is biologically plausible—low circulating levels of MCP-1 could conceivably reflect lower production by stromal and immune cell mediators within the synovium, thus reducing recruitment of monocytes, T cells and NK cells to the joints.

[0273] Interestingly, no significant increase in MCP-1 concentration was observed in longitudinal analysis of patients who experienced an arthritis flare. This observation suggests a possible modulatory effect of MCP-1 at baseline, as opposed to representing a surrogate measure of disease activity. However, whether the observed low levels of circulating MCP-1 reflect a qualitative difference in immune homeostasis in those patients who maintain DFR, rather than simply a quantitative difference in subclinical synovitis, remains open to speculation and would require the study of matched synovial biopsy tissue in these patients.

[0274] Interleukin-27

[0275] In this study, circulating levels of IL-27 at baseline is predictive of outcome following DMARD cessation, with high levels at baseline demonstrating particular discrimination for those patients who experienced an arthritis flare. Furthermore, there is a significant though small increase in circulating levels of IL-27 at the time of flare (mean fold change 1.07, unadjusted p=0.021). Taken together, these results imply a positive association between circulating IL-27 and arthritis flare. This would be in keeping with pro-Th1 actions of IL-27, though it is impossible to infer causality based on these data. Indeed, higher levels of IL-27 at baseline may serve to modulate the response to upstream perturbations of the immune response following DMARD cessation rather than play a causative role per se, for example by altering the signalling of other STAT-pathway cytokines such as IL-6. The robust increase in IL-6 observed at the time of flare in this study (discussed further below) lends some support to this hypothesis. Alternatively, it is even conceivable that high IL-27 may reflect a regulatory response to pro-inflammatory mechanisms, but that this regulatory response is somehow deficient in those patients who subsequently develop an arthritis flare.

[0276] Longitudinal Cytokine Data

[0277] Longitudinal observation of trends in circulating cytokine levels provides a tantalising insight in to the mechanisms underlying the emergence of RA flare. The most striking observation was that significant changes in cytokine levels were only observed in the flare group, whereas those patients who maintained DFR demonstrated very little, if any, longitudinal change in cytokine levels. This presumably reflects the substantial dysregulation of immunity that occurs at the time of arthritis flare, which is readily detected in the peripheral circulation. In contrast, the continued immune homeostasis underlying those who maintain DFR is likely to generate more subtle signals, which may furthermore be detectable only at the individual joint level.

[0278] The acute-phase proteins CRP and serum amyloid A (SAA) demonstrated the greatest increase from baseline to time of flare (mean fold change 2.16 [adjusted p=0.008] and 2.10 [adjusted p=0.035] respectively). Taken together, the observed increased concentrations of CRP and SAA at the time of flare in this study provide biochemical evidence of a robust systemic inflammatory response in patients who experienced an arthritis flare.

[0279] Further analysis of longitudinal cytokine trends in this study yields additional insights beyond only an increase in acute-phase response. IL-6 concentration was higher at the time of flare than baseline (mean fold change 1.50, corrected p=0.031) despite many results falling below, and thus being assigned the value of, the lower limit of detection for the assay. Given this technological limitation in assay performance, it is likely that the true difference in IL-6 concentration between baseline and flare is actually greater than that observed.

[0280] The observation that IL-6 levels rise in the approach to arthritis flare in this study is in keeping with the well-established role of IL-6 in the pathogenesis of the disease. Additionally, co-stimulation of Toll-like receptor 3 (TLR3) and TLR7 pathways has been observed to lead to transcriptional synergy of IL-6 and IL-12 in mouse macrophages, an effect mediated by interaction of the transcription factors Jun B. CCAAT/enhancer-binding protein beta (C/EBPβ) and IRF1 at the IL6 and IL12b promoters (Liu et al., 2015). This effect may be of relevance given the statistically significant though small increase in circulating IL-12 at the time of flare in this study (fold change 1.15, adjusted p<0.008).

[0281] Circulating concentration of the chemokine interferon-γ inducible protein 10 (IP10, also known as CXCL10) was significantly higher at the time of flare (fold change 1.36, adjusted p=0.043). Circulating concentrations of IP-10 are higher in RA patients versus healthy controls and correlate with disease activity (Kuan et al., 2010; Pandya et al., 2017).

[0282] The observation of higher circulating levels of IP-10 at the time of flare in this study would therefore be in keeping with an active flare phenotype where activated lymphocytes are recruited to the inflamed synovium. Furthermore, the postulated role of IP-10 in amplifying the recruitment of Th1 cells may be of significance given the increased levels of the pro-Th1 cytokine IL-12 at the time of flare.

[0283] Summary

[0284] Circulating concentrations of IL-27, MCP1 and CRP at baseline were predictive of flare and remission following DMARD cessation. Longitudinal analysis demonstrated increased levels of acute phase reactants (CRP and SAA) at the time of flare, together with the pro-Th17 cytokine IL-6, and the pro-Th1 mediators IL-12 and IP-10. Taken together, one can hypothesise a potent pro-inflammatory cytokine and chemokine milieu at the time of arthritis flare, characterised potentially by dysregulated Th17 and Th1 responses. The conservative approach of this study is likely to have artificially reduced the magnitude of observed increases in cytokine concentrations, such as that observed for IL-6 for example.

### Example 4—CD4⁺ T Cell RNAseq Results

[0285] Circulating CD4⁺ T cells provide a potential cellular compartment that is both important in RA pathobiology as well as easily obtainable without the need for invasive sample collection procedures. In previous studies, a protocol was developed to isolate CD4⁺ T cells from whole blood with a high cell yield and purity (Pratt, 2011). Herein, the transcriptional profiling of circulating CD4⁺ T cells unexpectedly represents a target to identify cell-specific biomarkers of drug-free remission.

[0286] Patient Samples

[0287] CD4⁺ T cell samples were available at all baseline, month three and month six study visits. In total. CD4⁺ T cell RNA was available for sequencing for 120/154 (78%) of study visits. CD4⁺ T cell RNA was available for sequencing at the time of flare for 18/23 (78%) patients who experienced an arthritis flare and was available at month six for 15/20 (75%) patients who maintained drug-free remission.

[0288] Time from blood draw to start of CD4⁺ T cell processing, and time from start of T cell processing to freezing of T cell lysate, were recorded for 117/120 of the sequenced patient samples. The median (IQR, range) time from blood draw to start of processing was 95 (80-150, 40-388) minutes. The median (IQR, range) time from start of processing to freezing of lysate was 242 (217-285, 166-333) minutes.

[0289] The number of cells in every T cell isolate was recorded to calculate the cell yield, with a median (IQR, range) value of 2.3×10⁵ cells per ml in whole blood (1.8-3.2, 0.5-7.2). The purity of every CD4⁺ T cell isolate was confirmed by flow-cytometric analysis as described (see methods above). The median (IQR, range) percentage of CD3⁺CD4⁺ cells in patient T cell isolates was 98.9 (98.3-99.3, 95.3-99.8). The percentage of contaminating monocytes and B-cells, defined as CD14⁺ or CD19⁺ respectively, were generally low. To account for small variations in CD4⁺ T cell purity, the percentage of CD3⁺CD4⁺ cells was included as a covariate in gene expression models together with sequencing batch.

[0290] Healthy Controls

[0291] Four healthy volunteers were recruited to donate blood as a control arm for comparison with the study population. The volunteers were aged 50 years (male), 40 years (male), 31 years (female) and 31 years (female) at the time of first donation. Sampling was performed at four time points (baseline, month 1, month 3 and month 6) from all participants giving 16 healthy CD4⁺ T cell samples in total. Blood was drawn where possible between 9 am-1 pm and left to stand before processing to mimic the collection and transport of the patient samples. Time from blood draw to start of CD4 T cell processing, and time from start of T cell processing to freezing of T cell lysate, were recorded for all samples. The median (IQR, range) time from blood draw to start of processing was 67 (56-90, 28-198) minutes. The median (IQR, range) time from start of processing to freezing of lysate was 254 (231-305, 170-333) minutes. There was no significant difference in mean blood draw or processing times between healthy controls and patients (p=0.141 and p=0.538 respectively, Mann-Whitney U test).

[0292] The median (IQR, range) cell yield for healthy control T cell isolates was 3.1 (2.3-3.7, 1.2-5.0)×10⁵ cells per ml whole blood. The mean cellular yield was not significantly different between healthy controls and patients (p=0.267, Mann-Whitney U test). The median (IQR, range) percentage of CD3⁺CD4⁺ cells in healthy control T cell isolates was 98.1 (97.6-98.9, 96.8-99.2). The mean percentage CD3⁺CD4⁺ cells was not significantly different between healthy controls and patients (p=0.156, Mann-Whitney U test). The percentage of contaminating monocytes and B-cells, defined as CD14⁺ or CD19⁺ respectively, was also determined. Significantly greater mean CD19⁺ contamination was seen for healthy controls versus patients (p=0.022). The explanation for this is not immediately apparent. Where data were available, the mean yield of CD19⁺ cells in parallel PBMC isolations was not significantly different between patients and healthy controls (p=0.843, Mann-Whitney U test). This suggests that the higher CD19′ contamination in healthy T cell isolates was not due to a greater number of CD19⁺ cells in healthy control versus patient blood—however, an absolute CD19⁺ cell count in whole blood, as opposed to the CD19⁺ cell yield following density centrifugation, would be required to confirm this.

[0293] RNA Yield and Integrity

[0294] The quantity and quality of RNA in each T cell lysate was measured by gel electrophoresis using a Tapestation™ 4200 machine (Agilent). The median (IQR, range) RNA yield was 870 (660-884, 277-2275) ng per million cells lysed. Prior to sequencing, the 28S/18S ribosomal RNA (rRNA) ratio and estimated RNA integrity number (RIN^{e}) were calculated for each sample. Lower RIN^{e} and 28S/18S ratios suggest RNA degradation; the RNAseq platform manufacturer (llumina) recommends a RIN^{e}>8 and a 28S/18S rRNA ratio >2.0 for high quality RNAseq analysis. The median (IQR, range) RIN^{e} was 9.4 (9.2-9.6, 8.1-10.0). The median (IQR, range) 28S/18S rRNA ratio was 2.6 (2.5-2.7, 2.1-2.9). There was no correlation between RIN^{e} and total time from venepuncture to freezing of T cell lysate (repeated measures R²=−0.023, p=0.833), suggesting that the RNA integrity was not affected by laboratory processing time during the T cell isolation procedure. There was no significant difference in mean RIN^{e} between patients and healthy controls (p=0.104, Mann-Whitney U test).

[0295] Sequencing Quality

[0296] Samples were sequenced to a mean (range) depth of 12.3 (9.2-18.4) reads per sample. Sequencing read length was tightly clustered around the expected 75 bp, and no samples were found with adaptor contamination >0.1%. Quality of the sequencing was excellent with a mean Phred score >30 across all read positions and no read trimming was necessary.

[0297] Baseline Analyses

[0298] All analyses were performed with adjustment for RNA sequencing batch and sample CD4⁺ T cell purity (see above). Change in gene expression was considered significant if there was >1.5 fold-difference in expression between groups at the 0.05 significance level according to the moderated t-test, after false-discovery rate (FDR) correction using the Benjamini-Hochberg procedure. Where changes in gene expression failed to meet statistical significance, unadjusted p-values were used as in a secondary exploratory analysis with a post hoc significance threshold of p<0.001.

[0299] Flare Versus Healthy Control

[0300] CD4⁺ T cell gene expression was compared between baseline samples of patients who flared following DMARD cessation versus healthy controls. Three genes were differentially expressed after FDR adjustment (FIG. 9A), and a further 55 were differentially expressed using an unadjusted significance threshold of p<0.001 (FIG. 9B). The entire 58-gene list is detailed below:

| | | Unadjusted | HGNC | |
|---|---|---|---|---|
| Ensembl gene ID | Log₂FC | p-value | symbol | Description |
| ENSG00000171560 | 2.42 | 1.05E−07 | FGA | fibrinogen alpha chain * |
| ENSG00000106927 | 2.13 | 1.21E−06 | AMBP | alpha-1-microglobulin/bikunin |
| | | | | precursor * |
| ENSG00000171564 | 2.00 | 3.19E−06 | FGB | fibrinogen beta chain * |
| ENSG00000163631 | 4.07 | 8.15E−06 | ALB | albumin |
| ENSG00000182489 | −2.85 | 2.50E−05 | XKRX | Kell Blood Group Complex |
| | | | | Subunit-Related, X-Linked |
| ENSG00000198538 | −1.30 | 2.89E−05 | ZNF28 | zinc finger protein 28 |
| ENSG00000223551 | 1.87 | 3.22E−05 | TMSB4XP4 | thymosin beta 4, X-linked |
| | | | | pseudogene 4 |
| ENSG00000226029 | 0.78 | 8.16E−05 | LINC01772 | long intergenic non-protein |
| | | | | coding RNA 1772 |
| ENSG00000141622 | 1.47 | 9.25E−05 | RNF165 | ring finger protein 165 |
| ENSG00000251411 | 2.32 | 1.08E−04 | | (known processed |
| | | | | pseudogene) |
| ENSG00000197841 | −0.93 | 1.11E−04 | ZNF181 | zinc finger protein 181 |
| ENSG00000164136 | 1.25 | 1.13E−04 | IL15 | interleukin 15 |
| ENSG00000172985 | −1.15 | 1.13E−04 | SH3RF3 | SH3 domain containing ring |
| | | | | finger 3 |
| ENSG00000247311 | 1.85 | 1.18E−04 | | (novel antisense) |
| ENSG00000112139 | 6.09 | 1.35E−04 | MDGA1 | MAM domain containing |
| | | | | glycosylphosphatidylinositol |
| | | | | anchor 1 |
| ENSG00000088538 | 0.85 | 1.52E−04 | DOCK3 | dedicator of cytokinesis 3 |
| ENSG00000131080 | 1.84 | 1.68E−04 | EDA2R | ectodysplasin A2 receptor |
| ENSG00000229314 | 2.72 | 1.73E−04 | ORM1 | orosomucoid 1 |
| ENSG00000125726 | 1.70 | 1.85E−04 | CD70 | CD70 molecule |
| ENSG00000152242 | 0.60 | 2.01E−04 | C18orf25 | chromosome 18 open reading |
| | | | | frame 25 |
| ENSG00000261115 | 1.94 | 2.31E−04 | TMEM178B | transmembrane protein 178B |
| ENSG00000172349 | −0.64 | 2.52E−04 | IL16 | interleukin 16 |
| ENSG00000229473 | 1.63 | 2.60E−04 | RGS17P1 | regulator of G-protein |
| | | | | signaling 17 pseudogene 1 |
| ENSG00000185010 | 1.07 | 2.65E−04 | F8 | coagulation factor VIII |
| ENSG00000267939 | 2.31 | 2.77E−04 | | (novel lincRNA) |
| ENSG00000279148 | 1.87 | 2.77E−04 | | (known TEC) |
| ENSG00000265293 | 1.64 | 2.79E−04 | ARGFXP2 | arginine-fifty homeobox |
| | | | | pseudogene 2 |
| ENSG00000261487 | 1.59 | 3.00E−04 | | (known processed transcript) |
| ENSG00000197180 | 1.29 | 3.01E−04 | | uncharacterized protein |
| | | | | BC009467 |
| ENSG00000169398 | −0.82 | 3.29E−04 | PTK2 | protein tyrosine kinase 2 |
| ENSG00000082213 | −0.70 | 3.48E−04 | C5orf22 | chromosome 5 open reading |
| | | | | frame 22 |
| ENSG00000072110 | −0.76 | 3.82E−04 | ACTN1 | actinin alpha 1 |
| ENSG00000228382 | 1.91 | 3.96E−04 | ITPKB-IT1 | Inositol-Trisphosphate 3- |
| | | | | Kinase B intronic transcript 1 |
| ENSG00000131969 | 1.92 | 3.98E−04 | ABHD12B | abhydrolase domain |
| | | | | containing 12B |
| ENSG00000149557 | 2.77 | 4.12E−04 | FEZ1 | fasciculation and elongation |
| | | | | protein zeta 1 |
| ENSG00000259657 | 1.35 | 4.33E−04 | PIGHP1 | phosphatidylinositol glycan |
| | | | | anchor biosynthesis class H |
| | | | | pseudogene 1 |
| ENSG00000165259 | 1.94 | 4.42E−04 | HDX | highly divergent homeobox |
| ENSG00000264739 | 2.16 | 5.08E−04 | | (novel antisense) |
| ENSG00000162892 | −0.61 | 5.55E−04 | IL24 | interleukin 24 |
| ENSG00000115129 | 1.15 | 5.65E−04 | TP53I3 | tumor protein p53 inducible |
| | | | | protein 3 |
| ENSG00000244588 | 2.25 | 5.89E−04 | RAD21L1 | Double-Strand-Break Repair |
| | | | | Protein Rad21 cohesin |
| | | | | complex component like 1 |
| ENSG00000272329 | 1.85 | 6.00E−04 | | (known lincRNA) |
| ENSG00000154655 | 1.66 | 6.13E−04 | L3MBTL4 | l(3)mbt-like 4 (Drosophila) |
| ENSG00000272630 | 1.09 | 6.41E−04 | | (known lincRNA) |
| ENSG00000171115 | −0.81 | 6.78E−04 | GIMAP8 | GTPase, IMAP family |
| | | | | member 8 |
| ENSG00000205786 | 1.13 | 6.86E−04 | LINC01531 | long intergenic non-protein |
| | | | | coding RNA 1531 |
| ENSG00000278356 | 1.34 | 7.01E−04 | | (known sense intronic) |
| ENSG00000159882 | −0.67 | 7.02E−04 | ZNF230 | zinc finger protein 230 |
| ENSG00000246016 | 1.95 | 7.53E−04 | LINC01513 | long intergenic non-protein |
| | | | | coding RNA 1513 |
| ENSG00000272086 | 1.27 | 7.64E−04 | | (novel lincRNA) |
| ENSG00000271447 | −1.47 | 7.73E−04 | MMP28 | matrix metallopeptidase 28 |
| ENSG00000160318 | 3.03 | 8.05E−04 | CLDND2 | claudin domain containing 2 |
| ENSG00000271680 | −1.73 | 8.45E−04 | | (novel processed |
| | | | | pseudogene) |
| ENSG00000273598 | −1.89 | 8.69E−04 | | (novel unprocessed |
| | | | | pseudogene) |
| ENSG00000162946 | −0.65 | 8.87E−04 | DISC1 | disrupted in schizophrenia 1 |
| ENSG00000228543 | 2.14 | 9.03E−04 | | (known lincRNA) |
| ENSG00000151729 | 0.64 | 9.34E−04 | SLC25A4 | solute carrier family 25 |
| | | | | member 4 |
| ENSG00000219433 | −1.71 | 9.71E−04 | BTBD10P2 | BTB domain containing 10 |
| | | | | pseudogene 2 |

Unabbreviated list of differentially expressed genes at baseline between flare patients and healthy controls, using an unadjusted significance threshold of p < 0.001. Positive log-fold change indicates higher expression in the patient group, whereas negative log-fold change indicates higher expression in the control group. HGNC: HUGO gene nomenclature committee; lincRNA: long intergenic non-coding RNA; * = significant after FDR adjustment.

[0301] In embodiments of the invention, the levels of the one or more biomarkers may comprise expression levels of at least 1, 2, 3, 4, 5, 6, 7, 8, 9, 10, 11, 12, 13, 14, 15, 16, 17, 18, 19, 20 or more genes selected from any one or more of the genes in the Table above.

[0302] In certain embodiments, the levels of the one or more biomarkers may comprise expression levels of at least 1, 2, 3, 4, 5, 6, 7, 8, 9, 10, 11, 12, 13, 14, 15, 16, 17, 18, 19 or all of ENSG00000226029, ENSG00000112139, ENSG00000247311, ENSG00000198538, ENSG00000163631, ENSG00000171560, ENSG00000171564, ENSG00000256913, ENSG00000259657, ENSG00000265293, ENSG00000204380, ENSG00000228382, ENSG00000279148, ENSG00000214081, ENSG00000165259, ENSG00000251411, ENSG00000154099, ENSG00000261487 and ENSG00000253676.

[0303] In certain embodiments, the levels of the one or more biomarkers may comprise expression levels of at least 1, 2, 3, 4, 5, 6, 7, 8, 9, 10, 11, 12, 13, 14, 15, 16, 17, 18, 19 or all of ENSG00000106927, ENSG00000226029, ENSG00000112139, ENSG00000247311, ENSG00000198538, ENSG00000163631, ENSG00000171560, ENSG00000171564, ENSG00000256913, ENSG00000259657, ENSG00000265293, ENSG00000204380, ENSG00000228382, ENSG00000279148, ENSG00000214081, ENSG00000165259, ENSG00000251411, ENSG00000154099, ENSG00000261487 and ENSG00000253676.

[0304] Univariate Cox Regression

[0305] Standard bioinformatics pipelines analyse differential gene expression dependent on the presence or absence of a binary outcome measure. Whilst this approach benefits from many years of accumulated knowledge and refined computer packages, it is inherently underpowered in comparison to survival analysis when analysing time-to-event data. Therefore, in a further analysis, the association between gene expression at baseline and time-to-flare following DMARD cessation was analysed across all sequenced genes using univariate Cox regression. Using this approach, 19 genes were identified that were significantly associated with time-to-flare by a post hoc unadjusted p-value threshold of <0.001 (FIG. 14).

[0306] None of the genes were robust to multiple test correction, although the Benjamini-Hochberg procedure appeared particularly conservative in its correction relative to the two-way analyses (Table below). No significant departure from proportional hazards was observed for any of these 19 genes.

[0307] In preferred embodiments of the invention, the levels of the one or more biomarkers may comprise expression levels of at least 1, 2, 3, 4, 5, 6, 7, 8, 9, 10, 11, 12, 13, 14, 15, 16, 17, 18 or 19 of these 19 genes.

| | | HR_{flare} | | Unadjusted | Adjusted | HGNC | |
|---|---|---|---|---|---|---|---|
| Ensembl gene ID | HR_{flare} | 95% CI | B | p-value | p-value | symbol | Description |
| ENSG00000102362 | 4.30 | 1.93-9.58 | 1.46 | 2.04E−05 | 0.555 | SYTL4 | synaptotagmin like 4 |
| ENSG00000247033 | 1.84 | 1.33-2.54 | 0.61 | 4.11E−05 | 0.559 | | (novel antisense) |
| ENSG00000276571 | 0.40 | 0.25-0.65 | −0.91 | 7.33E−05 | 0.615 | | (novel antisense) |
| ENSG00000204965 | 0.46 | 0.31-0.68 | −0.78 | 9.04E−05 | 0.615 | PCDHA5 | protocadherin alpha 5 |
| ENSG00000241146 | 0.41 | 0.27-0.63 | −0.89 | 1.44E−04 | 0.785 | RPL7P41 | ribosomal protein L7 pseudogene 41 |
| ENSG00000250030 | 2.63 | 1.58-4.36 | 0.97 | 2.15E−04 | 0.863 | | (novel processed pseudogene) |
| ENSG00000213296 | 0.37 | 0.20-0.66 | −1.01 | 2.50E−04 | 0.863 | | (known processed pseudogene) |
| ENSG00000229619 | 5.30 | 2.05-13.7 | 1.67 | 2.72E−04 | 0.863 | MBNL1-AS1 | muscleblind-like protein 1 - antisense RNA 1 |
| ENSG00000125046 | 0.37 | 0.22-0.61 | −0.99 | 2.97E−04 | 0.863 | SSUH2 | suppressor of stomatin mutant uncoordination (ssu-2) |
| | | | | | | | homolog (C. elegans) |
| ENSG00000182489 | 0.53 | 0.38-0.75 | −0.63 | 3.17E−04 | 0.863 | XKRX | Kell Blood Group Complex Subunit-Related, X-Linked |
| ENSG00000144366 | 1.87 | 1.30-2.70 | 0.63 | 4.84E−04 | 1.000 | GULP1 | engulfment adaptor PTB domain containing 1 |
| ENSG00000237473 | 3.42 | 1.58-7.39 | 1.23 | 5.28E−04 | 1.000 | | (known lincRNA) |
| ENSG00000228010 | 0.25 | 0.11-0.56 | −1.38 | 6.02E−04 | 1.000 | | (novel antisense) |
| ENSG00000250827 | 0.47 | 0.30-0.74 | −0.76 | 7.86E−04 | 1.000 | MFSD4BP1 | major facilitator superfamily domain containing 4B |
| | | | | | | | pseudogene 1 |
| ENSG00000042286 | 10.2 | 2.42-42.6 | 2.32 | 7.94E−04 | 1.000 | AIFM2 | apoptosis inducing factor, mitochondria associated 2 |
| ENSG00000231305 | 0.24 | 0.11-0.56 | −1.41 | 7.99E−04 | 1.000 | | (known antisense) |
| ENSG00000255330 | 2.66 | 1.32-5.36 | 0.98 | 8.33E−04 | 1.000 | SOGA3 | suppressor of glucose, autophagy associated (SOGA) |
| | | | | | | | family member 3 |
| ENSG00000227070 | 2.15 | 1.41-3.28 | 0.77 | 8.47E−04 | 1.000 | | (novel antisense) |
| ENSG00000162636 | 12.9 | 2.57-64.5 | 2.56 | 9.14E−04 | 1.000 | FAM102B | family with sequence similarity 102 member B |

Association between baseline gene expression and time-to-flare following DMARD cessation by univariate Cox regression, using an unadjusted significance threshold of p < 0.001. HGNC: HUGO gene nomenclature committee. LincRIMA: long intergenic non-coding RIMA. P value calculated by the likelihood ratio test.

[0308] Multivariate Cox Regression

[0309] The 19 genes that were significantly associated with time-to-flare at unadjusted significance level of <0.001 by univariate Cox regression were entered into multivariate Cox regression model. Stepwise backward selection based on Akaike Information Criterion (AIC) was then performed in order to reduce the number of variables to a practical size for the purposes of a biomarker signature, where a lower AIC score indicates a better model (see above). After five selection steps, 14 variables remained in the preliminary backwards stepwise multivariate Cox model (Table below), with a reduction in AIC from 86.97 to 79.42. The 13 variables in this model with a p value <0.2 were then taken forward to a second round of stepwise backward selection. Although this 13 variable model had an AIC slightly greater AIC (79.81) than the 14 variable model, this could be reduced further by an additional two selection steps. This generated a final stepwise multivariate Cox regression model with 11 variables and an AIC (77.69) that was lower than the 14 variable model (Table below). Proportionality of hazards was demonstrated for all variables in both the 14-variable and 11-variable stepwise models, and for both models as a whole.

| Ensembl gene ID | B | HR_{flare} | 95% CI HR_{flare} | p |
|---|---|---|---|---|
| ENSG00000204965 | −2.80 | 0.06 | 0.01-0.58 | 0.015 |
| ENSG00000241146 | −1.90 | 0.15 | 0.03-0.71 | 0.017 |
| ENSG00000229619 | 4.48 | 88.2 | 2.05-3800 | 0.020 |
| ENSG00000228010 | −7.12 | 0.00 | 0.00-0.59 | 0.034 |
| ENSG00000125046 | −2.53 | 0.08 | 0.01-0.88 | 0.039 |
| ENSG00000162636 | 13.62 | 8.19 × 10⁵ | 1.18-5.69 × 10¹¹ | 0.047 |
| ENSG00000227070 | 4.11 | 60.64 | 1.03-3560 | 0.048 |
| ENSG00000250827 | 1.78 | 5.92 | 0.95-36.8 | 0.056 |
| ENSG00000042286 | 2.75 | 15.6 | 0.86-284 | 0.063 |
| ENSG00000247033 | 2.22 | 9.20 | 0.88-96.4 | 0.064 |
| ENSG00000276571 | −1.46 | 0.23 | 0.05-1.17 | 0.076 |
| ENSG00000237473 | 1.77 | 5.87 | 0.72-47.9 | 0.098 |
| ENSG00000182489 | 0.85 | 2.33 | 0.77-7.06 | 0.133 |
| ENSG00000102362 | −2.34 | 0.10 | 0.002-4.30 | 0.227 |

Association of baseline gene expression and time-to-flare following DMARD-cessation in a preliminary 14-variable backward stepwise multivariate Cox regression model. B: Cox regression coefficient. P-value calculated by the Wald test.

[0310] In preferred embodiments of the invention, the levels of the one or more biomarkers may comprise expression levels of at least 1, 2, 3, 4, 5, 6, 7, 8, 9, 10, 11, 12, 13 or 14 of these 14 genes.

| Ensembl gene ID | B | HR_{flare} | 95% CI HR_{flare} | p |
|---|---|---|---|---|
| ENSG00000228010 | −4.15 | 0.02 | 0.00-0.14 | 2.24E−04 |
| ENSG00000162636 | 6.97 | 1060 | 22.6-50000 | 3.88E−04 |
| ENSG00000227070 | 1.78 | 5.94 | 2.08-16.9 | 8.63E−04 |
| ENSG00000204965 | −1.69 | 0.18 | 0.07-0.52 | 1.45E−03 |
| ENSG00000229619 | 2.93 | 18.7 | 2.90-121 | 2.08E−03 |
| ENSG00000247033 | 1.18 | 3.26 | 1.53-6.98 | 2.29E−03 |
| ENSG00000125046 | −1.49 | 0.23 | 0.09-0.60 | 2.62E−03 |
| ENSG00000241146 | −1.32 | 0.27 | 0.10-0.71 | 7.96E−03 |
| ENSG00000276571 | −0.83 | 0.44 | 0.18-1.07 | 7.07E−02 |
| ENSG00000250827 | 0.71 | 2.04 | 0.89-4.69 | 9.42E−02 |
| ENSG00000042286 | 1.75 | 5.78 | 0.68-49.3 | 1.09E−01 |

Association of baseline gene expression and time-to-flare following DMARD-cessation in a final 11-variable backward stepwise multivariate Cox regression model. B: Cox regression coefficient. P-value calculated by the Wald test

[0311] In preferred embodiments of the invention, the levels of the one or more biomarkers may comprise expression levels of at least 1, 2, 3, 4, 5, 6, 7, 8, 9, 10 or 11 of these 11 genes.

[0312] ROC Analysis

[0313] Based on a p value threshold of <0.001, three variables were selected from this final stepwise multivariate model, namely: ENSG00000228010, ENSG00000162636 and ENSG00000227070. Candidate genes were explored for their biomarker utility either alone, or in combination with each other—when combined, expression values for each gene were weighted by the respective coefficient in the final stepwise Cox regression model. Patients were dichotomised for each gene score using two thresholds determined by ROC analysis optimised for the prediction of flare and remission, as previously discussed above (see Table below).

| | | | Remission | Flare | |
|---|---|---|---|---|---|
| ENSG00000228010 | ENSG00000162636 | ENSG00000227070 | threshold | threshold | ROC_{AUC} |
| ✓ | ✓ | ✓ | 59.19 | 60.55 | 0.900 |
| ✓ | ✓ | X | 75.86 | 79.4 | 0.854 |
| ✓ | X | ✓ | 39.33 | 41.17 | 0.841 |
| X | ✓ | ✓ | 0.18 | 2.69 | 0.820 |
| X | ✓ | X | 19.21 | 19.97 | 0.750 |
| ✓ | X | X | 56.38 | 59.1 | 0.743 |
| X | X | ✓ | −19.11 | −15.96 | 0.685 |

Composite scores ranked by area under the receiver operating characteristic curve (ROC_{AUC}). Variables included within each score are indicated in green, and those excluded are indicated in red

[0314] The ROC curve for each variable, together with the survival curves for dichotomised groups based on flare and remission biomarker thresholds are presented in FIG. 15. Based on overall AUC, itis clear to see that the composite scores provided greater predictive utility than any of the single gene expression variables alone. The prognostic performance of the composite scores are detailed further in the Table below.

| | ROC_{AUC} | | Sensitivity | Specificy | PPV | NPV |
|---|---|---|---|---|---|---|
| Variable | (95% CI) | Threshold | (95% CI) | (95% CI) | (95% CI) | (95% CI) |
| ENSG00000228010 | 0.90 | Flare | 0.78 | 0.95 | 0.95 | 0.79 |
| ENSG00000162636 | (0.81-0.99) | (60.55) | (0.61-0.96) | (0.85-1.00) | (0.84-1.00) | (0.67-0.95) |
| ENSG00000227070 | | Remission | 0.91 | 0.75 | 0.81 | 0.89 |
| | | (59.19) | (0.78-1.00) | (0.55-0.90) | (0.70-0.92) | (0.74-1.00) |
| ENSG00000228010 | 0.85 | Flare | 0.61 | 0.95 | 0.94 | 0.68 |
| ENSG00000162636 | (0.74-0.97) | (79.4) | (0.39-0.78) | (0.85-1.00) | (0.81-1.00) | (0.58-0.80) |
| | | Remission | 0.96 | 0.45 | 0.67 | 0.91 |
| | | (75.86) | (0.87-1.00) | (0.25-0.65) | (0.59-0.77) | (0.70-1.00) |
| ENSG00000228010 | 0.84 | Flare | 0.65 | 0.85 | 0.83 | 0.68 |
| ENSG00000227070 | (0.72-0.96) | (41.17) | (0.43-0.83) | (0.65-1.00) | (0.68-1.00) | (0.56-0.82) |
| | | Remission | 0.91 | 0.65 | 0.75 | 0.88 |
| | | (39.33) | (0.78-1.00) | (0.45-0.85) | (0.65-0.88) | (0.71-1.00) |

Predictive utility of cytokine/chemokine variables in predicting flare following DMARD cessation, with a positive test defined by either flare or remission thresholds. Optimum pairs of predictive metrics are highlighted in bold. NPV: negative predictive value; PPV: positive predictive value.

[0315] Overall, the 3-gene composite score performed the best for prediction of both flare and remission and discriminated patients with significantly different flare-free survival times (Formula below and FIG. 16).

[0316] The 3-gene composite biomarker score, based on log-transformed gene expression values:

Composite score=6.97(ENSG00000162636)+1.78(ENSG00000227070)−4.15(ENSG00000228010)−1.22(ACR/EULAR Boolean remission)

[0317] In even more preferred embodiments of the invention, the levels of the one or more biomarkers may therefore comprise expression levels of at least 1, 2 or 3 of the genes selected from ENSG0000022810, ENSG00000162636 or ENSG00000227070.

[0318] Sensitivity analysis Incorporating processing time During the laboratory isolation procedure, CD4⁺ T cells are alive until the final cell lysis step. The transcriptional profiles of the cells may therefore be influenced by the isolation procedure itself. In order to ascertain the effect of this upon the composite biomarker score, a sensitivity analysis was performed whereby the three genes from the final composite score were entered in to a multivariate Cox regression model with the addition of total time from venepuncture to freezing of CD4⁺ T cell lysate. Total processing time showed no significant association with time-to-flare, whereas the three genes remained strongly associated independent of processing time (Table below). Proportionality of hazards was demonstrated for all four variables and the model a whole.

| Variable | B | HR_{flare} | 95% CI HR_{flare} | p |
|---|---|---|---|---|
| ENSG00000162636 | 2.863 | 17.51 | 3.15 | 97.31 |
| ENSG00000227070 | 0.713 | 2.04 | 1.32 | 3.14 |
| ENSG00000228010 | −1.785 | 0.17 | 0.06 | 0.44 |
| Total time | −0.004 | 1.00 | 0.99 | 1.00 |

Sensitivity analysis incorporating genes from the final composite biomarker score, together with total time from venepuncture to freezing of cell lysate, in a multivariate Cox regression model. B: Cox regression coefficient

[0319] Baseline comparison of flare versus drug-free remission patients—discussion In the primary analysis of the gene expression data of this study, CD4⁺ T cell gene expression was compared at baseline between those patients who experienced an arthritis flare versus those who remained in DFR following DMARD cessation. Although substantial number of differentially expressed genes (DEGs) were observed, none of these were robust to multiple test correction. Using post hoc unadjusted p-value thresholds of <0.001 and <0.01, 11 and 118 genes respectively were identified as differentially expressed at the pre-specified >1.5 fold-change level. Pathway analysis of the all 118 DEGs identified 12 as functioning within a network of genes involved in cell cycle, cell death and inflammatory response processes, though with no connecting edges between these identified nodes.

[0320] Flare patients—flare versus baseline visits The comparison of CD4⁺ T cell gene expression between flare and baseline visits revealed two DEGs that were robust to multiple test correction, and 81 DEGs at the unadjusted p<0.001 threshold. These DEGs included up-regulation of genes encoding microtubular and centrosomal proteins, together with topoisomerase-IIα, all of which are known to play crucial roles in the cell cycle. The most significantly up-regulated gene by p-value was cell division cycle associated 7 (CDCA7). MKI67, which encodes the cell-surface molecule Ki-67, was also up-regulated at the time of flare in these cells.

[0321] Several genes not directly involved in the machinery of the cell cycle were also observed to be up-regulated at the time of flare, such as low-density lipoprotein receptor (LDLR), thyroid stimulating hormone receptor (TSHR), basic leucine zipper ATF-like transcription factor (BATF), and CD109. The observation of increased LDLR expression by CD4⁺ T cells at the time of flare may represent a regulatory response that could be perturbed in the patients who experience an arthritis flare.

[0322] DFR Patients—Month Six Versus Baseline Visits

[0323] Nineteen DEGs were observed at an unadjusted p threshold of <0.001, with substantially lower mean expression values than the 81 DEGs observed at the same significance threshold in the flare vs. baseline analysis. Furthermore, many of DEGs observed in this remission analysis were pseudogenes of unknown function. Functional analysis suggested downregulation of genes within a network of cell signalling and injury, though with very few edges between the identified nodes. Perplexingly, 3/9 of the protein-coding DEGs were immunoglobulin genes, which was unexpected in this CD4⁺ T cell analysis. This may represent genuine low-level CD4⁺ T cell expression of immunoglobulin-related genes.

[0324] Another unexpected observation was the downregulation of IL10 at month six versus baseline in DFR patients (log₂FC −0.89, unadjusted p 5.14×10⁻⁴). This was mirrored by a trend towards higher IL10 expression at the time of flare vs. baseline in those patients who experienced an arthritis flare (log₂FC 0.68, unadjusted p=0.004). Given the well-established role of IL-10 as a predominantly immunoregulatory cytokine of crucial importance to the function of Tr cells (Pot et al., 2011), it is surprising that its expression by CD4⁺ T cells would decrease with time in those patients who maintain DFR. Nevertheless, there are two conceivable explanations for this observation. First, IL-10 is not exclusively immunoregulatory, and its role in promoting B cell proliferation is thought to be of importance in the pathogenesis of some autoimmune diseases such as SLE (Peng et al., 2013). Thus, reducing IL-10 production by CD4⁺ T cells could help maintain remission in certain settings. Alternatively, lower expression of IL-10 could represent a gradual shift away from a regulatory Tr1-like phenotype and towards an effector state. However, the absence of any of the DEGs identified in the flare vs. baseline comparison would suggest that if this were occurring, then the CD4⁺ T cells are unlikely to be following a similar differentiation pathway to that observed in flare patients. Indeed, the functional relevance of this observed reduction in CD4⁺ T cell IL-10 production with time in the DFR patient population is hard to interpret in the absence of measures of inflammation and gene expression within the synovial compartment.

[0325] Predictive Biomarker Survival Analysis

[0326] Using a similar approach as previously, univariate followed by multivariate Cox regression was performed using the RNAseq data in order to develop a predictive biomarker of DFR and flare following DMARD cessation. Cox regression was selected as the analysis model of choice, as this allowed for use of a time-to-event outcome measure, rather than the binary grouping to flare versus DFR described above. This was anticipated to yield greater statistical power —indeed, unadjusted p values were on average 10-fold smaller for the Cox regression analysis compared to the baseline flare vs. DFR comparison. However, standard bioinformatics pipelines for survival analysis using RNAseq data do not currently exist, and adjustment for false-discovery rate using the standard method of Benjamini-Hochberg appeared particularly conservative when applied to the univariate Cox regression results. The issue of apportioning statistical significance in Cox regression analysis when using high dimensionality data has been highlighted in the published literature (Witten and Tibshirani, 2010).

[0327] Univariate Cox regression identified a similar set of genes associated with time-to-flare at the unadjusted p<0.001 threshold as compared to the standard analysis pipeline of DEGs between flare vs. DFR groups, thus providing a degree of internal validation of this approach. After stepwise backward multivariate Cox regression modelling, three genes were identified whose expression significantly associated with time-to-flare at the p<0.001 threshold: ENSG00000228010, ENSG00000162636 and ENSG00000227070. One of these genes (ENSG00000162636) encodes the protein family with sequence similarity 102 member B (FAM102B). Whilst no publications exist concerning the function of FAM102B, the paralogous FAM102A (also known as Early Oestrogen-Induced Gene 1) is known to be involved in oestrogen signalling (Wang et al., 2004) as well as osteoclast differentiation (Choi et al., 2013), and is implicated in cell membrane trafficking (Zhang and Aravind, 2010). Both ENSG00000228010 and ENSG00000227070 are predicted to be novel antisense genes, though no published data relates to their putative targets or physiological function. In a composite score, these three genes predicted flare and sustained DFR following DMARD cessation, with an ROC_{AUC} of 0.90.

[0328] In certain embodiments of the invention, the levels of the one or more may comprise expression levels of at least 1, 2 or all 3 of the genes selected from ENSG00000228010, ENSG00000162636 and ENSG00000227070.

[0329] Summary

[0330] The most illuminative results from the analysis of CD4⁺ T cell gene expression have come from the longitudinal comparison of flare visit with baseline. This analysis revealed a strong signature of upregulation of genes involved in cellular proliferation, as well as the pro-Th17 transcription factor BATF. These results provide evidence of activation of CD4⁺ T cells at the time of arthritis flare and are in keeping with a phenotype of systemic inflammation in keeping with clinical measures of increased disease activity, and the observed increase in levels of acute-phase and pro-inflammatory cytokines such as IL-6 (see above). Furthermore, comparison of baseline CD4⁺ T cell gene expression in flare patients versus healthy controls demonstrated upregulation of several genes encoding proteins known to be correlated with disease activity in RA, such as IL-15 and ORM1. This may suggest greater subclinical levels of inflammation in these patients at baseline, thus predisposing to a greater risk of arthritis flare upon DMARD cessation.

[0331] Unexpectedly, baseline expression of as few as three genes performed well in discriminating flare vs. DFR when re-applied to the same test cohort. The predictive performance of these genes in combination with clinical and cytokine/chemokine parameters will be addressed in the next Example.

### Example 5—Integrative Analysis

[0332] Results are analysed from all variable domains in order to synthesise a global predictive biomarker score to predict RA flare and sustained drug-free remission following DMARD cessation. The motivations for this integrative analysis are two-fold. First, by combining variables from different domains it is aimed to create a global biomarker score that outperforms any of the single-domain composite scores. Second, the process of variable combination can be expected to lead to variable redundancy, thus allowing for the final variable set to be smaller than the sum of the individual domain variable sets.

[0333] In performing this integrative analysis, a two-step variable reduction incorporating univariate approach is followed by stepwise backward multivariate Cox regression modelling. Receiver-operating characteristic (ROC) curve analysis is then used to further refine the variable set and select an optimum model for use as predictive biomarkers of flare and sustained remission following DMARD cessation.

[0334] Variable Selection

[0335] Before starting the process of integrative analysis, a reduced variable set was defined for exploration. The number of variables was reduced not only to avoid unnecessary and laborious downstream model reduction, but also to minimise over-fitting of the expansive data set to the relatively small study population.

[0336] Baseline variables were selected based upon their statistical significance in the domain-specific backward stepwise multivariate Cox regression models described in the previous Examples. Only those variables which were associated with time-to-flare in their respective multivariate models at an unadjusted significance threshold of p<0.05 (or p<0.001 in the case of gene expression data) were selected for integrative analysis. Thresholds were not set for the Cox regression coefficients, as these were expected to change with the merging of variable domains in the integrative analyses.

[0337] In total, 11 variables were selected for integrative analysis as detailed in the Table below.

| Domain | Variable |
|---|---|
| Clinical | RhF positive |
| | ACPA positive |
| | ACR/EULAR Boolean remission |
| | Months since last change in DMARDs |
| | Current methotrexate |
| Cytokine | ln(MCP1 + 1) |
| | ln(IL27 + 1) |
| | ln(CRP + 1) |
| CD4⁺ T cell gene expression | ENSG00000228010 |
| | ENSG00000162636 |
| | ENSG00000227070 |

The eleven baseline variables selected for integrative analysis.

[0338] Cox Regression

[0339] The association between baseline variables and time-to-flare following DMARD cessation was analysed by univariate Cox regression for the 43 patients where complete data was available (Table below). No significant deviation from proportionality of hazards was observed for any of the univariate variables. Given the univariate nature of this analysis, the coefficients and statistical significance of these variables mirror those already detailed in the previous Examples—minor discrepancies reflect the exclusion of the single patient without cytokine data.

| | | | | Unadjusted |
|---|---|---|---|---|
| Variable | B | HR_{flare} | HR_{flare} 95% CI | p value |
| ENSG00000228010 | −1.49 | 0.23 | 0.10-0.50 | 0.0003 |
| ENSG00000227070 | 0.75 | 2.13 | 1.40-3.24 | 0.0004 |
| ENSG00000162636 | 2.47 | 11.8 | 2.33-60.2 | 0.0029 |
| ln(MCP1 + 1) | 2.21 | 9.13 | 1.97-42.3 | 0.0047 |
| ln(CRP + 1) | 0.43 | 1.53 | 1.02-2.31 | 0.0421 |
| Months since last | −0.02 | 0.98 | 0.97-1.00 | 0.0471 |
| DMARD change | | | | |
| ACPA positive | 0.82 | 2.27 | 0.96-5.37 | 0.0622 |
| RhF positive | 0.77 | 2.15 | 0.91-5.11 | 0.0824 |
| ln(IL27 + 1) | 0.95 | 2.58 | 0.78-8.53 | 0.1203 |
| ACR/EULAR remission | −0.65 | 0.52 | 0.23-1.19 | 0.1223 |
| Current methotrexate | 1.46 | 4.31 | 0.58-32.1 | 0.1535 |

Association of baseline variables with time-to-flare following DMARD-cessation, as analysed by univariate Cox regression. B: Cox regression coefficient.

[0340] All 11 baseline variables were then entered in to a multivariate Cox regression model. Stepwise backward selection based on Akaike information criterion (AIC) was then performed to fit a stepwise Cox regression model (see above). After four selection steps, 7 variables remained in this stepwise model (Table below).

| | | | | Unadjusted |
|---|---|---|---|---|
| Variable | B | HR_{flare} | HR_{flare} 95% CI | p value |
| ENSG00000227070 | 1.14 | 3.12 | 1.81-5.36 | 0.00004 |
| ENSG00000228010 | −1.98 | 0.14 | 0.05-0.36 | 0.00005 |
| ENSG00000162636 | 2.82 | 16.72 | 2.24-125 | 0.00608 |
| ln(IL27 + 1) | 1.92 | 6.85 | 1.61-29.1 | 0.00915 |
| ACR/EULAR Boolean | −1.22 | 0.29 | 0.11-0.76 | 0.01205 |
| remission | | | | |
| RhF positive | 0.94 | 2.56 | 0.91-7.19 | 0.07470 |
| Current methotrexate | 1.66 | 5.28 | 0.55-50.2 | 0.14779 |

Association of baseline variables with time-to-flare following DMARD-cessation in a backward stepwise multivariate Cox regression model.

[0341] Proportionality of hazards was again assessed for each variable in the final stepwise multivariate Cox regression model. A significant departure from proportional hazards was observed only for current methotrexate use (p=0.006), though as noted before in Example 3, this was only notable for a single outlier with no discernible trend in the remainder of the data. The global Schoenfeld test was non-significant (p=0.087), indicating proportionality of hazards for the model as a whole.

[0342] Receiver-Operating Characteristic (ROC) Analysis

[0343] Five variables were significantly associated with time-to-flare a tan unadjusted significance threshold of <0.05 in the multivariate stepwise Cox regression model: ENSG00000227070, ENSG00000228010, ENSG00000162636 ln(IL27+1) and baseline ACR/EULAR Boolean remission. Values of these five variables were multiplied by their respective stepwise multivariate Cox regression coefficient and then summed to create composite scores. The predictive performance of all 31 potential combinations of these variables to predict flare and remission following DMARD cessation was then compared by area under the receiver-operating characteristic curve (ROC_{AUC}). The ten composite scores with the highest ROC_{AUC} are shown in the Table below.

| ACR/EULAR | | | | | |
|---|---|---|---|---|---|
| Boolean remission | ENSG00000162636 | ENSG00000227070 | ENSG00000228010 | ln(IL27 + 1) | ROC_{AUC} |
| ✓ | ✓ | ✓ | ✓ | ✓ | 0.963 |
| ✓ | ✓ | ✓ | ✓ | X | 0.954 |
| ✓ | X | ✓ | ✓ | X | 0.927 |
| ✓ | X | ✓ | ✓ | ✓ | 0.920 |
| ✓ | ✓ | X | ✓ | ✓ | 0.918 |
| X | ✓ | ✓ | ✓ | ✓ | 0.908 |
| X | ✓ | ✓ | ✓ | X | 0.908 |
| ✓ | ✓ | X | ✓ | X | 0.902 |
| X | X | ✓ | ✓ | X | 0.874 |
| ✓ | ✓ | ✓ | X | ✓ | 0.867 |

The top ten integrative composite scores ranked by ROC_{AUC}. Variables included within each score are indicated in green, and those excluded are indicated in red.

[0344] The composite score with the highest ROC_{AUC} included all variables; notably, the removal of In(IL27+1) resulted in only a small drop in ROC_{AUC} (Formulae below and FIG. 17).

Composite score=1.14(ENSG00000227070)+2.82(ENSG00000162636)+1.92(ln[IL27+1])−1.98(ENSG00000228010)−1.22(ACR/EULAR Boolean remission) Five-variable composite score

Composite score=1.14(ENSG00000227070)+2.82(ENSG00000162636)−1.98(ENSG00000228010)−1.22(ACR/EULAR Boolean remission) Four-variable composite score

[0345] Composite Score Predictive Performance

[0346] The sensitivity, specificity, positive predictive value (PPV) and negative predictive value of each of the three composite scores detailed above are presented in the Table below and FIG. 18, using the same threshold values as in the main analysis. A single optimum threshold for each composite score was selected manually based on minimising the ROC coordinate distance from the top left corner of the ROC curve plot.

| Composite | Threshold | ROC_{AUC} | Sensitivity | Specificity | PPV | NPV |
|---|---|---|---|---|---|---|
| score | value | (95% CI) | (95% CI) | (95% CI) | (95% CI) | (95% CI) |
| 5-variable | 37.41 | 0.96 | 0.91 | 0.95 | 0.96 | 0.90 |
| | | (0.92-1.00) | (0.78-1.00) | (0.84-1.00) | (0.87-1.00) | (0.78-1.00) |
| 4-variable | 23.16 | 0.95 | 0.91 | 0.89 | 0.92 | 0.89 |
| | | (0.88-1.00) | (0.78-1.00) | (0.74-1.00) | (0.81-1.00) | (0.77-1.00) |

Utility of the two composite scores in predicting arthritis flare following DMARD cessation. PPV: positive predictive value; NPV: negative predictive value.

[0347] Discussion

[0348] In this integrative analysis, variables from the composite biomarker scores of clinical, cytokine and RNAseq domains were combined together in a multivariate Cox regression model, with backwards stepwise selection used to create a final model with five variables: three gene expression (ENSG00000228010, ENSG00000162636 and ENSG00000227070), one cytokine (IL-27), and one clinical (ACR/EULAR Boolean remission). Whereas the role of the three gene variables remains unknown, the relevance of IL-27 and ACR/EULAR Boolean remission in the context of DFR has been identified previously.

[0349] When re-applied to the study population, this 5-variable composite score demonstrated a high predictive utility for outcome following DMARD cessation: ROC_{AUC} 0.96 (95% Cl 0.92-1.00), sensitivity 0.91 (0.78-1.00), specificity 0.95 (0.84-1.00), PPV 0.96 (0.87-1.00). NPV 0.90 (0.78-1.00). Thus, in this study population, patients with a negative test score had a 90% chance of remaining in DFR at the end of the six-month follow-up period, versus only 4% for those with a positive score. Such a score would undoubtedly be of great utility in helping guide DMARD withdrawal in the clinic and would represent a quantum leap beyond the approximately even chance of flare that would otherwise be predicted in the absence of a predictive biomarker based on outcome of the entire non-stratified study population.

[0350] Throughout the description and claims of this specification, the words “comprise” and “contain” and variations of them mean “including but not limited to” and they are not intended to (and do not) exclude other moieties, additives, components, integers or steps. Throughout the description and claims of this specification, the singular encompasses the plural unless the context otherwise requires. In particular, where the indefinite article is used, the specification is to be understood as contemplating plurality as well as singularity, unless the context requires otherwise.

[0351] Features, integers, characteristics or groups described in conjunction with a particular aspect, embodiment or example of the invention are to be understood to be applicable to any other aspect, embodiment or example described herein unless incompatible therewith. All of the features disclosed in this specification (including any accompanying claims, abstract and drawings), and/or all of the steps of any method or process so disclosed, may be combined in any combination, except combinations where at least some of the features and/or steps are mutually exclusive. The invention is not restricted to any details of any foregoing embodiments. The invention extends to any novel one, or novel combination, of the features disclosed in this specification (including any accompanying claims, abstract and drawings), or to any novel one, or any novel combination, of the steps of any method or process so disclosed.

[0352] The reader's attention is directed to all papers and documents which are filed concurrently with or previous to this specification in connection with this application and which are open to public inspection with this specification, and the contents of all such papers and documents are incorporated herein by reference.

The application's sequence listing, which the Patent Office published only in electronic form, follows.

SEQUENCE LISTING (19 sequences)

SEQ ID NO: 1 - DNA, 58833 bp, Homo sapiens
ggtggctactttgtcatcattaagtgttattaaaaaataaaaaatatctttgccaaagaatctcattattgttctaatttgcttttctttgattactagtgagttggatattttaaccagttgtgtccttgagtgtgtatgtatgaatttagtctacgcttttgcccaaaacgtttctattttagacagacatttatttgccataaaaggccacaagtcaaaggatcagaatggtattatattttatttactcaaattagatagttcatactcttttatcttcttagaagtgtgagacaatttgacaacttttgactcagctgaacgaaagagacaggtgatttcaccgtctaagagagtgaccaacagatggaagtaagtgggtgaggaggcacgtctagtgttagacccctatcctcagtccccaggctcccattcctaacctggaaggacattcctcttgtgtctcaaggctttgggtcccagagctcccttttgggctgagtggccccctgctaaggagcccggggcgctgtgcggcccctttaagagtccagctcctccccgctccagggaaagttgcagctttttccgcctcccgggagggtgagaagggccggctgccggagctgggttgcgatcttcccggagccggagaccctcccttgaaaccggcactgggacttctcgatctctggaggcacctgttgcaagtgacaggtaggtcaacagccagcggccggcccctcgccctcggtccggtgctccttctggacccccagctccttttcgctgctgaagcgcccccacccccatctcggggtcgtgcgtcttccctacccgctctctggtcccccaatttttccttctccctagctgaccgcgtctcccctctccccgtccgcctctcccgaccgcatccccaggcttggactcccgtctgcttgggcggtccctcccggccacttttctttctccagggcttcttctggccccttccctgacccacccagcactaatgcggtctgtgcccctctgggagccgcctcccctctcctcttcggctcccctcgcggggagtgcccgggctttttcccgccagcccgagctggtgcccctcccgagagctggccctgggggcgggggcggggccgagctcctagcgggaactgcgccctccaaggcgtccagtcaccttttcgtgggttcctctcacagcgctcggccgtcgagcggggtcgctaacccgcactctcttcggacctacgacatcgcggcttctctggcgttggccagtcagccacaggtaaaggctggaggctggttggctggagtcctgcctcagtgggctccctctgcgcttggggctggggacctggctgtgtgctgtggagctgctttatattgccgctcttcaagcaggctgtgagagatctggtactggaggagggtccccgagatctcagaaggggcacagaatgcttctgtctcctgtgttggtttgtaatggggcagaaaaaggtgttcctccaacccttaacattgaatgaggtgggatttggggtggtgaaatcatttggttagaattctggtggcttgaaaagtggtgactttctaatcaagcttttcttcccccagtaccctgcttcttcaggattagaggacgtaaaattccagagtactgtgcttggcagggttgaccctagaccttgtatatttgtggcaaaaatgagtcttctgtacatcctggacctcctatatttaactggcttattttctgctctttaagctccccacccccacctctcataaatctattaatattgaggtattaatgacttaagacttttgtcgctgtgggaacaatgtttaatgcagagacgtggccttgatgaagttttctgcgtttttggttgtttggtttttagcaccctagtagaaaagcaccaccaacttggcttgtgaggccctttttgggcagaggatgaacatttctggtaacacaatttcaggtgtctcactcttggtcagagcagtgaaatggagctggaggcctgttctggggtaattgatctgtgagtatatgtagcattctggctctctgagcttgttaggctctggttgttaggctccattgagctggacactgtgataagttctttacataaaaatgcaatcctcacaataactctatacagtaggtgctacagttataaccatattatgatgaaaaagagactgagaagttaagtgccttgccctcaaaatctcggaggcagagcttgtgttcctatcctgtcacaccacctctgttgtcttagatgttgggaacactgaatagctcatggatgaggactaagtgattaaaaaattgtcttccaagcccaagtatatgtttttctccttgcttccaccttagatgcactgccgagactatggactacttaccttactgatgtcttacccacttcatttccaacatgggccagttgccacgttaccactataagtacacatccctgagtgtaattagatgaatgaaatctcccgggttttcagctctgtggtaattgtcctgaagttaggggagggtaaccctggattctagggatgtgtgcctgactcaacttcttcctctcctgctggctaggggagaaatgagggagtggtaagtgatatggatttcctgacagccataccagagagcctgagggtgatcgtgtgctagttttgtcatgggatggatggagtaccatagacaaggataggaagaaaatgtcctccctattcccatctctgggactttgctcaaactgttcctttttttcttcctaaaaagctaactttcctccctcattccccctcccctgacattaattcctatccatccctcaagattgagttctaaagtcacctcctttggaacggccttactgaacacatacttcttcccccaagcagaattgccagttatcctgtgtcctaaagcactttgtttacacctcagtaaagcccttaacactgcttagttgtttttccacctggaaggctgtaagttctctaagggcaaggtctggatctcggagctccctttgtcttaaatataagatgttggcaaatatttgtgccagtaaccggacataccatgccattccttcaaggggctgaggtgtagtgatggtggggttgaggtacagaagacaccttcctgaggcacttgaaataccacagctaggaatttgccctgaccaccctatttaaacgtgtaatcccttccctgaacattccatatgccctttccctaccttattacattgttcttgcttattgtctgccctcccactccctcacccaccataacataaacaccctgtgggcagggattgctgtctgttgtattcaccagtagactcttggacccagaacagtccttggtacatcataggtgcatactaatatttgttaatgaattaatggcattgccattctaggaatttggcactcttggagttaggcactcctggacctgaaactaagcctacccagtttgtcgccctacaggtgtaagtttgccccaggcccaaaactcagctttacttctgctgatttttgctttgagattgcattcctgatgccaactttgacctagttggaagtacttcctctctcttacttttttttttttttgaggcagagtttcgctgtgtcgcccaggctagagtacagtggcgcgatcttggctcactgcaagctctgcctcctgggttcatgccattctcctgcctcagcctcccgagtagctggaactacaggcgcccgccaccatgcccggctagctttttgtgtttttagtagagacgggatttcaccgtgttagccaggatggtctcgatcttctgacctcgtgatctgccctcctcggcctcccaaagtgctgggattacaggcgtgagccaccgctcctggcctctctattttttaaaagtatgagtctctgggtggaaatctctaaagtttaaaagtggaaatgtaaaaatgttgtgcttcttgttggtaggaagggggactgcactgggaggaaggggtgtggattgtcagatgtcttgaggcttttcaggcttctcgcaagatcaataagaggctggagaaagttactgtgcaatggggaagtgaacagctcaaaagaataacggatggcacaaattaggcttctggtttcaagttacccatagccttttaggtatgaggtggttattggattatggaactttatggaaaagccgtagctgagtgctatttgtgttgtacttaactagttttctaccaggatgactgtgcagtctggagaaaccactgtgtaacataaaagaaaaaagtgctattctgtttaaaagtgttttgaaatgttcagaaaggaagaggccagaatctcttagaagacagacttggaaggagttgggcccttcaaaaggtggtaaatatgtgattctcatcatttaatatatgttaacttatttgaaactcaaatttgtacaaaaagctgaccagcttctttttctactaaatttgtctccccagcctttgaacattgcagtgacctggggttcagtccctggacttttctccatctaaaatcttcacagaggctctcatccagctgcatggctttgaagaacatctgtctagactgttgtcactcccaaatttatgtttgttacccaggcctttcttctaagctgcagcctcatatatccaatgacctatttgacatctctgcttgcctatcagatagacctctcaaatgtaacgtggccaaaacggcactcccgattgcccttgtattcccaccctcttccctcagcactccctgtctcagtaaaatgtcaccatcatccattcagttgctcaaaccaagaacctaagatcacccttgattcttctttttctatcactgctctccacccaatttaattcatgagggagtcctgctgacctgatcttcagactgtatcatgtgttctgccacacgtctccatctcctctgcctgtcaccctagtccaagccaccacacgtctgccacaaacattcttgcataatgctcaaggatatatatatacacaagtatttttgtgggatagctttctaataggagaattgttaggtcaaaggacatatacattaaacaatttaaataggcatcaccagagtgacatctaagagggtttaccctttcaccattgcgagtggttttcctcctgcccttgctgaggatggatgacgcttttaattttttccaatctgataggtgaaaaatagtatctaactgatttaacttggcatttctctgatcactagtgtggctgagcatcttttcatttgtgctagctatttgtatttttccaagacttgctcctttatatcctttgcacatttatcttttgggttatatatttgatttgtttgtaagaacactatatttattagttatatttacccattgcctattatatagtgcaagtttttttctctctagtctgtcatatgtcataactttgttcatgatgtgtacccctctcgtaatcagataaaacccactataaaacatttaaaaaacacgttcattagatttggcaattaggaggccaatgacaacatcagtgcagcaggaggagagaaggcagatcgtagagggttgggcagtgaggactgagaaggactgataaaaaatatggtagatacacatggacatggagagtgggatgatagacaatggagactcagaagggtgaggggtgggagaagggtagatgatgagaaatttcttaatgggtacaatgtatgttattcaggttatagataccctaaagtctctgacttaaccactgcatatgtaacaaaattgcatgtgtaccccataaatttatataattaaaaacatgtagtatatacattgaagaagcttggctatgatgggaaggagagagtgttccttatagacagtaaggcacaggggataaaaaggctgttttatttaattttgttttactttaaatataagagatagatgagcccatttatgtgcagatggcatacagcttgatgatgcaaggtccccgagaaagtcagagggtgggagtgccagagtgaaagaggagaaaagactagccttagagaaaaagtggtggctcttccattgaaacaagaggattcaccaatcctcttggtaaaaactatggagaaggaagtacctgtggagggacaggattttgagagagcccctccgcccccaacaagagagtgaaaggttcaccagagagtaaagaaggcaagaatggtgaagggttggaatagcatttgagagagacgaaaagaggagttctttaggggcatatcatccaggttatgtatgtgtatttcaaaatatcatgctgtacaccataaatagacacaatttttgtcaagtatacctccataaaactggaaaaaagttttaaaatggcttgggtaacttgaatttgtctctgcctcaagtcgcagaaccctgtatccattctgtctggcagcactcatcagaccaggaacagagtgtggacaatctagtatggggaattttttccgggtggccgtgacagaaatagggagagggctggagattggatggccctggcagaagaatagttgaaatgatggaccactgtggctttcatattcatatctgtgactatctaaacctaacttgaccttgagtaatttttaagaagtagaaaatttccatggcatctacactgcttcttgtttgtagctctatcgattcaggcatcagaataccattagtatcagtgtctttaaactcatcagaaagcgtgatttgatttactgagggcctatgttgtgccatgctctgtgttgatttactgaggatttacgttgcaccaactgagagcctacagtcaggatcctacaatgtagatttatccatctatccatccatcaacccagctagatgcttgaggtatggctgagaagaaggtagacaatggccatttttctcctggaacttatttcggcaggggaagtgtatattaaatattgtatcacataattttttaattacaattgtgataagttctgtgaagttcagttttcttagaaatcagattgtcacattgctttttaacaggccttactaatttacatttgccaacaaaatatgagaatatctcttaaatcctttttaaaaactgaaaattgtctttctgaaattttgctgaattaataagcaaacataaaaaaatctttattgccagtaagagtgaaactttttctttttgatgtgtattggccatgtgatttttcccctttaagaattatctattcacgctctctgtctattggatacttacctcttcttgtttttaatagatctctcattccatgtttgaaaccattagctacacttctctcctttctctcttagccctggtgaccttaaaatattttcccctagtctctacggccattcccttttgatctcctgtgaaatttttttcttacctagaagtgttgctgtgcttagggatgggactacatttttattacttgactcaataaaaggtaacatataaatcttctgttcctgcttatcccactctccagaggtaacaatgttaagattgtatttctttctagacatttttccattcatccatgatccaatctgtctaaaatgtaaacaaataaaaatggaatcataatatatatgatttgcaatttttttaatttaatatgctttcagtgtcagtatatatagaactacagtaccttcttctttttttttttttcttttttctttttattgatcattcttgggtgtttctcgcagagggggatttggcagggtcacaggacaatagtggagggaaggtcagcagataaacaagtgaacagaggcctctggttttcctaggccagaggaccctgcggccttccgcagtgtttgtgtccctgggtacttgagattagggagtggtgatgactcttaacgagcatgctgccttcaagcatctgtttaacaaagcacctcttgcaccacccttaatccattcaaccctgagtggacacagcacatgtttcagagagcacagggttgggggcaaggtcacagatcaacaggatcccaaggaagaagaatttttcttagtacagcacaaaatgaaaagtctcccatgtctacctctttctacacagacatggcaaccatccgatttctcaatcttttccccacctttcccccctttctattccacaaaaccgccattgtcatcatggcccgttctcaatgagctgttgggtacacctcccagacggggtggtggccgggcagaggggctcctcacttcccagtaggggcggccgggcagaggcgcccctcacctcccggatggggcggctggccgggcggggcgctgaccccccccacctccctcctggacggggcggctggccgggcgggggagctgatgacccccccacctccctcccggacggggcggctggccgtgtggggggctgaccccccccacctccctcccggacggggcggctggccgggcagaggggctcctcacttcccagcaggggcggccgggcagaggcgcccctcacctcccggacggggcggctggctgggcggggggctgaccccccccacctccctcccggacggggcggctggccgggcggggggctgacccccccacctccctccctgacggggcggctggcctggcgggggctgaccccccacctccctcccggacagggtggctggcctggcgggggctgacccccacctccctcccggacggggtggctgccaggcggagacgctcctcacttcccagacggggtggctgccgggcggagggactcctcacttctcagacggtgcggctgccgggcggaggggctcctcacttctcagacggggcggccgggcagagacgctcctcacatcccagacggggcggcagggcagaggcgctccccacatctcagacgatgggcggccgggcagagacgctcctcactgcctagatgggatggcggccgggatgaggcgctcctcacttcctagatgggatggcggccaggcagagacactcctcacttcccagatggggtggcggccgggcagaggctgcaatctcggcactttgggaggccaagggaggcggctgggaggtggaggttgtagtgagccgagatcacgctactgcactccagcctgggcactattgagcactgagtgaacgacactccgtctgcaatcccagcacctcgggaagccaaggctggcggatcactcgtggttaggagctggagaccagcccggccaacacagcgaaatcccatctccaccaaaaaaatacgaaaaccagtcaggcgtggcggcgcgcgcctgcgatcgcaggcactcggcaggctgaggcaggagaatcaggcagggaggttgcagtgagccgagatggcagcagtacagtccagcttcacctctgcatcagagggagaccgtaccttcttctttttaacaaaggcacaatattccctaatatgtgtgtacaataactagtcagtttcctttgatggatgtttatgttctttaatttttttttttttgctgtttcaaatattgagcatcctcagaatatatatttgtgaatttacttgaatatcagcagaataagtttctcaaaatgaaatggctatgttaaaaatatggtcagtggtactaaagatccagagaaatctaggaagaccaagaactgtctattggatttaggaagttcttggtgaccttagagcaatttcagagaactgtgaggcagaaagctaaactatggtgggttgagaaatgattggagagatgaggaagtgaaggcagtgattatgtacaattccttagagaaatctgtctggctttgaagagcagagaaagggtagtagcaaggaaggagttgagattgaggacctgttatttatttatttatttatttatttaggaaggacttgagttcctttaaaggctggtgggaaggagggactaattaatagagcaaaatccttggaaggcaaagtccttatgccagatgggaggggatccagattgaggtagaggattatcctcaataggcatagatgaaagtaggttcatagatttggcggcaggaacttgtctgatggtatttctatttctctatgatataatagttaaggccaacctcttagagcaggggttaagatgggacaaggtttgagttagatatttgtggtatttgaagaaggtttgaaatagttattgtggagaacaggagagcagcctagggaagcatagttgcagtgccaggcagggttaagatgagcttggtgaccaagaattcatatggataataatctaccagagtgtgatttttttttctccagtagatctcaggagtccttgtgcatgcataaagtataacagttgggcttagaagagctatggttttttaaatcagatatttgcagtgaaattatgcattattgaggatattgacaagagtgcagttgaaacaatagaattggctgggtgcggtggctcacaccagtaatcccagcactttgggaggctgaggcgggtggatcacctgaggttaggagctcgagaccagtctggccaacatggtgaaaccccatctctactaaaaatacaaaaattagccgggcatggtggcgcacacctgtaatcccagctacttgggaggctgaggcaggagaatcgcttgaatccaggaggcagtggttgcagtgagccaagatcatgccactgcactccagccagagcaatagagaaaaagtctcagaaaaaaaaaagagaaagaaacaataaaatttaaatgttattgggaaggaagtaaagatgggaaggagctgaggaggtgaaagcagaagggtctatggaagactgcccccatccaagaaatctgagaacaggaatggggctagttggggggctcattggctgaataggctagaagcacagcaggttgtggtcagagagggggtgttgaatcagtgatatcaaaggtggagaagtcctagatgataagctcttgggtgtggctgaatatgatatatggtattcttgatgccagctcattcattcaacaaatatttattttgtgcatattatgatccaggcagtgctctaggcaccaaaggtacagaaatgaacaaaacaaagtcccttctgtcatacagcttacaatctagtgggggagattatttttataaactaaaagaacatccttattgatgtgctgattcctgtatgtgtagctttatttgtaactaatgataataccaggatcaaatatttacatatatgggggctaagaaggtccatctaggcattttgagtatcttgctttatctcaagttatacttactgaattatgaaaactcatacctcttttccccttagaactttttaaggtatttttacttactatgtcagtattgaaaataaacaaatatatacaaatctaatttgaatatttcattggttttaattttttatactgtattttttaaaaatattaggatattgcttcaagctgtagaccagatgttgataatgcatgtactaatcttgctctagggatttgatgtaatgtgtaaagtaattatggttaagcagtttaggagggaaagagggcttgtaataagttaatattttatgtttatttttatattattctccaatttattttattatttatacctaccttttaatgtacatatggtcatgtatatatttattaatattttatttgaaagaaataagcatttatttggcatcttataggcctcaagtaacactttaaaattacctgccacgtatgcaattcaatttaaattcaactacaggttattttttattgttttaaggtttctgtggccatagccagatcacagcatccctaaaattaaaaagaaaccaaatgcatgaaatcacagttatgtgtgagcatgggctggattagtcatgaaccatgatgatttcacatttaaggggactgtgtgggtaatttttaggtgacatggtctgcaagaaataatcagatgccagttagagttcagtttagaaatccccaccatctgtgatcccagcaggagaagagggtcttccctgcgggggtgctgcattatcaaagcttgttgactaaggaaagataatagtgttctgcgtgggaggtgatgaggcttattgaaaaataacaatgtgtcagctctcactggacttaaaaatgttttgtacatataaatgacctagattttaaaacagtccattcttttagttggggattttagattttttaaaaatctaaaaaatggggctgtcaaggaaggggcttttggcagagaagagggtaaactggccatcctgcacccatcagcctatgaggctcttgtgtctggctcatgttagaggaagcttcaaatgtagattttgaaagctggaaagctaaatgggatttgttttaatatatgtattttccctgttgccaagtagggtgtttggacacatggtctttataatattttagagttacttctatgtatcacatttatggaaatctgccttctaggattggtggtgggtttaaggcaccttctagagttgctgaggagcaggggacaaacgtgtagaatcatgaaggaccacatttccacatatccaaaacaaccattctgcaggagaaatgaatatatagtattaagatatctgacttccttctgggacttgttttagagttgtatatattattttaagtgggaatttctacaaaccatttatgaacagaatttgttggtattgaaaggtagctatgtggattccatctggaggaaattgtccccacatatgattctaagagctaacaaaagaggcattttagttactaccactgccttcttccaccctgctgcccacccccaccccctgccccaccattatgcacctgccatcttttaggatggatgtcctggatgaggggaatgagttattgtcttgtgtataatgttgctttgagctagagttgctctggcgtgttacacatattgcaggaggaggtcaggggtctgggaaagtaagccagactgagggcctctcaaacattgtgtttgttattagctgaagacttttagaaaccccacctcaagttcctgaggttgatgttcccttttccaaaaatcaccatatagagcaatattgccagaatatgaagagacagtataatgtaatgtaacggttaagagcttggactctggaaccagacggcctgggtccaaaaaccagactgtcacagggcatgtgaccttgagcaagttatttgctcaatctgtgcctcactttcctcatttgtaaagtggacataataatttagtacctacctcatagtgtgattgtgaggactaaataaagtgcttagaagagtgcatggtacataataaacattatagaagtgttaactatcattgtcatcatcttcatcagttggtggatatcttaaaaggagtgaaaaccggccaggtgagatggctaatgcctgtaatcccagcacgttgggaggccgagatgggcagatcacgaggtcaggcatttgagaccagcctggccaacatggtgaaaccctgtctctactaaaaatacaaaaattagccgggtgtgatggcacacacctgtaatcccagctactgggaggctgaggcaggagaatcccttgaacccaggaggcggaggttgaggtgagctgagatggcgctgcctaactccagcctgggcaacagagtgagactccatctcacacaaaaaaaaaaaaaggagtgaaaagcacaaaatgcctcagcacatgcaaactctacttttgtagaatctattttgaaaaggatcgtagggagccaaaaccttactgcaaaatcagaattttgtaaaattaagagctagttgtaaatttctcattgttagggaaaaatacagctttgctcccatacaacttttgagaatggatttgtgaaggcaggccctaggggattttatgtgaggcatagatgtgctccatggatggacaggtgagggtctagaccccagctgactcctaggaagcctcagttgccctttggttttggagccttgatactgactctaccagtttgtctccactcctatttttcttctttttgatcctatttttaaaatttatgatattttttgatgttttatgaatctttgtaagtcactttaaatcctgtctggaacagtgtataaataaatatcctttaaactgatcatatctaattactaacatttgcttcatatttatgcttgtcagcctccctccatgcagagaggtacggtgaccttccatctaggcaagaatactgattagatttctcaaatttcatagaaagatgtcaaaactgccatatgctcatatattttccaaagcatatggttaataataattaaaactaaacagctaccaatattgggtgcttactctaggccaggcactatgctatgccttttactcatgatgcatgcttgaatcctcaaagccataggcaggagctcttattattaatcctcatttttacaaatggggaaacagactcaaggaggttaaataacttgcccaaagttaattcagggaaaaagcaaagctgtgattttaacccaggcagctcagatccagtgcttttaagcacaattctatgctatactgtccttaattagaaatctagcacatcagaactccaagtcctagtataagaggccgtacttgtgttacagaacattcacaggtcctgcagattttctctccgtgtaatgtctttaatatgcccctttccatctctagtgccactgccctctactcttggctcttgttatctttcccctggatttatgccacagcctcctcaaatccatagtctgcaaaattgtcagtgtgccctaacaagtccttgctttacataaaactcttcaatgatttctgttgtcaaaggctaattagccgtgtttttgcgcgtagcatatggagcacccgccagccacacatgatgtgattccccacctgcctcttccgcattctcccttacaatttaaaccaaccagcatcattgtattacttgctcataccacgttgctttatgcctccatgcttttgtaagtgctacgcactttgcctggaaagccctcgttctcctgcttatccagctgaaaaacattaatttacaatcagttcatgtgctactgctggatattctctttctagttccctttccccaagctgaattatgtgccctcccttggtattcttataatatctcatgcatatatttctttggttaccatgttttttttttaggattatttaagtgtctctgttactaaactgtgaactctgtgggcatggactagctctgttcttttcttcttagccagctagtgtaccgcttagcacatagttggccctcctaactagtgagcattctgtaacagtgcagaatacagagctctaggacagggaaagaagtaagatttggaaggcctgaaactgtgcacacattcaaagataattaccaggacagcagaaggagctcttgcagaaaaatctttggggccaggtaatttacattatttaacccaagagccagaaaggatgtggggagatgggagctggggtctgaatccaaagggaactttgaaacttctaagaagccagacttagcagctttataaattgaaacttccttgaatttgtctgagtagcctggaataggtatctaagacagttacattttaataagaatatttatagttttctaggagagacatcaccctaaaattgaaaggggcagttgatacaataaccaacacaatatcccaaagcaattattttattgactgtaagcaatgttgtatgctcatgcaaatgttaccagtaagatgttatccattggtatttttgtgcataggtggctggatccagacaaggggattttaggaagccctgcatccctggaagctttcttttctacttgagtttttttcttttttttttttttttttttaagttttgcagaccaccatatactctggatttggtttcatttttccgtgctctaaaatcaacttttttttttttttttttttttttttttttttttgagatggagttttgctcttgttgcccaggctggagtgcagtggtgtgatctcagctcaccgcaacctctgcctctcaggttcacgtgattcttctgcctcagccttcccgagtagctgggattacaggcatgcaccaccatgccagggtaattttgtatttttagtagagacggagtttctccgtgttggtcaggctggtcttgaactcccaacctcaggtgatccgcccgcctcggcctcccaaagtgctgagattacagacgtgagccaccgctcccggccaaatcaactcttttacctttagattatcaaataactagtcccccgcccatcggtactagattttgctaccttttagggctatgcttcacccatgttctggaaacccacacaaataatacgtattagttttgacagtactttagcttgatctgctttagatgctgtcattgcctttgtcacaattagttaatagagtccacttttttttttttttttttttttgagagagagagaaaaggtcttattctgtcacccaggctggagtgcagtggcccaatcttggctcactgtagccttgacctcccgggctcaggtgatcctcccacctcagccttccaagtagctgggattacaggcacataccaccacacctggctaatttgtgtgtgtgtctgtgtctgtgtgtgtgtagagagatggggtttcaccgtgtagtccaggctggtctcaaactcctgggctcaagagatcctcccacctcggcttcacaaattgctaggatgagccacctcacctagcctagagtccacttttgaatgtgtcttatgacagcaaaaattcttattcattatgctgtactacttgcataagagcaactgcattacaatcatcagaatgatttattctttcctaattaacatacatcatatctctatgcaagcagaatcatgaaaatatatggcaatttgtagaatagtttcccttaaccagcctttaagtaaaggacttcctagcttttttgattactcacctttatcaccccaaatttttatcactcctaaaataagtatttataaactacattatttaccactgtattggtcatatattataaagcatgcacaggccaggtgtggtgtctcatgcctgtaatcccagccctttgggaggccgaggcaggaggatcacttgagtctaagagttcgagaccagcctgggcaacatggtgaaaccccatctctacaaaaaataaaaacaaagtagccaggtgtggtggcttgtgcctgcaatcccagctactggggaggctgaggtgggagaattgcttgagtccaggaggtcaaggctacactgagctacgattgtgccgctgcactccagcttgggtgacagagtgagactctgtctcaaagaaaaagcacaaaaatggaaataaagaaggatgagagattaaatgaacttttaaaaaataattctaatatttattaatggtacaataacctttgctctcattttgatgaggccagtgacattaaatgtgcttcatttaaacaaaattttggtttatgatacagctacttgaacatctgattctaacttctgtttatttttatacttgattttaatgactgatgcctcacaaagtatatacattttaaaataaaagaagtatattgtttggatgcacttactaaataatcatactcatattacagttccaggcaccagttatgcaaacattttattgctgttcctgaacctgctgtcttttatgtttttgacaaattgaaaagttaaaacgtgaaacatcttttagataacaaaactgtgtagtaagggaaatatttcaaacctactctgtattgtttattctctattaaaaaaccttggccaggcacggtggctcacgcctgtaatccccgcactttgggaggctgaggtgggcagatcacgaggtcaggagatcgagaccatcctggctaacacggtgaaaccctgtctctactagaaatacaaaaaattagccgggtgtggtggcgggtgcctgtagtcccagctactcgggaggctgaggcaggagaatggcgtgaacccaggaggcggagcttgcagtgagccaagatcgtgccactgcactccagcctgggcaacagcaagactccatctcaaaaaaaaaaaaaaaatcttgacataaaatattttagtgtttcaattaatttaaaggctcctagtgtcttgtaggtattctgggattggaaaacatgattacaagaagaaagtttagttacatttaatattaaaatgtttaaaaacattttattgaactacaatagacaaattatatataaagtatacaatttgacaaattttgacatctgtatatatccatgaaactatcaccagaattaagatattgaacatctatcacctccaaaagtttccttgtgccatgttgtaatccttccttcttgtccctgtgtgctattaccctccttacccccgtcaactcctgaaaccactgattctgttttctgacactatgtattttctagaattttatataaatgaaatcatacagtgttttttttttgcctgacttatttcagtcagcataattattttgagattcgttcatgttgctatgtgtatcagtagttcattcttctctattgctaagtagtattccattgcatgggtatactacaatttgtttatccatttacctcttagtaggcatttgggctgtttccagatttgggctattaccaataatgctgttaacatttccatgcaaatctgtgtaggcatatgcttttttttttcccccttttgaggcaaagtctcactctgttgcccaggctggagtgcagtggcgcaatcttggctcactgcaacctccacctcccaggttcaagcgattctcccacctcagcctcccaagtaactgggattacaggcatgcaccaccacacccagctaagttttgtttttgttttcttttgagacggagtttccctcttgttgcccaggctggagtatagtggcacgatctcagctcactgcaaccaccacctccctggttcaagctattctcctgcctcagcctcccaagtagctgggattacaggtgcctgccaccacacctgggtaattttttgtatttttagtagagacggggtttcaccatgttgatcggctggcttcaaattcctgacctcaagcgatccgcccaccttggcctcccaaagtgctgggattgtgggtgtgagccaccacgtccggcctacgtatgcttttgcttttcttggataaataccaaaagtggaaagcctgggtcatatgggagatatatgtttaactttttaagaaactgctaagctgttttccaatatggctataccatttcacattcccactgtagtgtatgagagttccagttgcttcaaatgccggccaacatttggtgcattttaaattttggtcattctaataagtatgtagtgatatctcattgtggttttagtttgcatttccctaatgattaatgatgttgatcatgttttcatgtgtttatttgctatttgtatatcttctttggtgatatgtttattcatatcttttgtctattcatatcattgtctattttttaaatttgtgtttttaaaaatattgtagagttctgagagttctttatatatgctggatataagtccttatcagatatactagttgcaaatattttcttccagtatactgcttatctttttattttctaataaagttcttacaaagcagaggttttaaattttgatgaagcctaatttatcaagttctggatcacgttttacgtgtcatgtcagaaatgcttgctttttttgtttcatatggatatctagtttttccagcactacttgttgaaaagactgccatttctccactaaacttcccttaacctttatttaaaaaatcaagtgactataaacatgagggcttatttccatactctctattctgttcgtttatttgtctgtcttcctgcccagtaccacattgacttgattactgtggatttatagtgtctcttaaaatcaggttaagtttccgctttgttctaccatatgttttgaacctcacaatatatcgttatttttcctttaaacggtcgattatattttaaaagagatttaaataataagaaaaaagtatttttacctacattgttaccattgcatgtgctctgtatccctttttgtaaacctatatttctgtgcagtaccattttctttctgcttcaaggacttcctttaacactttttatagtgcaggtctgctggtgattaattctttcaacttttgcatgtctgaaaaagtctttatttcacctctgtttttgaatgatatcttgctgggtgtagaattctatctaggttgatggttgttttttttctttcagtattttagagaggttgttctgtctttacacttgcattgattccaatgataaatttgcttttatcattatctttgttcatctgtatatatataatgtgtccttccccaagaccccaaccccaccccaccccaccactctagcttcttttaagattttcccattgtttctggttttaagcaatttatggtgtgccacatggtatatttttctttatgtttctggtgctttatgttcatagagcttcttggatctgtgagtttatagtgttcaccaaatttgggccattatttttggtgacatcaatgacatgtatagaaggtagcttgatgttgtcccatagctcattaattcctttttctttttttcagttttttctgtgttccattttgaataatttctattgctatgtcttcaagttcttaactcttttctactgtaatgtccaatttgctgttaatcccaacgagtgtgtttttcatctcagacattgtaccttttatccataggtttgatttgagtctttttacatctcccatgtcccctgcctagctttttgaacatatagaatgcagttataataactgctttgatgactttgtttactaattctaacatttgtgtcagttcttggtctttttgattgatttttctcattattatggatcatattttcttgcttttttgcatgcctgttagttttttactgggtaccaaatattatgaatttgaccttgttgagtactgcatatttttgtattactataagtatacttgctctctgttctgggatgcccttaaattacttggatacagagtgaccctttcaggttttgctgtttagatttgttaggcaggaccagagcagtgcataatctgggctatttcccactactgaggcaagacccttctgagtccttcagctagtgtcccgtgaatcatgacgttttccaatttggctggcggaaacaggcactattcttagccctgtgtgagtgacaggcattgttcttttgaatcctttcaggtagttctttccctggcctagagtaatttcctcacaggcataccatgggctaatcagtcctttgctaaacacttgagtgaaaccttctgcaggcctctgaagatctctttctctttctgtggagctctctcaggtcctctgtcctatgaactccagctacctggtttttttcccagactctcagctctgtctccagaactcagggagttcactaggctctacctgggttcttcctttctgtaccattatctggaaattctcttaagacagtaagctgggaaaatcaaagggctcaccttatgtgttttccatctcagaaatcataatccttcattgcctgatgttcagtgatttgaaaaccattgtttcatgtatttggtacatttgttgttgttgttattgtttcaggcagggtggaaattcattccaccttgacattttataatctccaattatgaccaattaaaatttgtagcccaatttaaattctcatctttcgaaaaaagtgtagacaccatcacatttcttgacgtagctaaatcagttctgaatacccatgttcaaaagtatacagaatctggcatgcagcagtataaatctcacatcagtataaaactcattgatcagtttcggtgtaaaacatagtatcattttaaaaagagcagtttaattcaggcttcttggttaaatgaatatattttgaaagactctggttcactttttcatgttcagtgaggtattgtccattgtccttagcctaaacagcaaaatacttttattacatcactttggcaggatatgataatccattagaatgtatttgcaaaaccatcatataattactacttataactttagagaataatttaatatcagttcagccttttggcccttgagcatgggtcaatttttaagaaaatcttctgtcatctataaggctgtcagcatggttcctcacttcaaaaacagtggcctgtgattaatgcattaaaattaatcactataaattcatccatgtacccaaaaactacttgtaccccaaaagctattgaaataaaaaaatttaaagaacaataacaatagcctgaaactttaactgacgtctagacagtttaactcacaattcatctgcattctttaaaagaaaataaatgtcattttctaagacctagttaagtccgaaagcacaaatgaacatatacaaactgacaaaaataggtaacacttagcattctttgtgttctcattactttaagcactttacgtattttaaaaactcatttaatctttataaaaacaagccccaaaggataggtacaatttttatcttcattttgcaagtgaggaaattgaggtactgagaggattagtaacttacccaaggtcacacagctagtaaatgtggaagttgggattcaagttcaggcagtctggctcaattccaagctttttgtttgtttgttttatggacacagagtctcactctgtcgcccaggctggagtgcagttgcaccatcttggctcactgcaacttccgcctcccaggttcgagccattctctgcctcagcgtcctgagtatctgggactacaggcgcaagccaccatgcctggctaatttttttttttttttgtattttttgtagagacagggtttcaccatgttggccaggctggcctcaaactcctggcctcaagtgatccacccgccttagcctcccaaaatgctgggattgcaggtgtgagccacccacctggcccagagtccaagcttttaaccacagctcacacactgcctcaggaaaacaaaaacatttttctctcagctctattacagctcttcaatttccatgggtttaagtttaaacatgtaaacacagatagatttctgggtaaagacattcactagacttttgttgaactcatactgtgtgtcacacactgtgccaagctcctggggctatgatatccagatatagtacctaccttcaaagaggttacgtctggtagatgtttctagtttgagcataagtaccatatattaccatcttcacttttatgtgtggcctgcatgcaacacagcaaaatctgttgtatttgctgtccagggcagggacattacttgtgtcttcctaattcacatcagttttcattttgggaacaccaatgattacttttaatctgagtactattcttacaaggaattctatattttagtcatctttttaatattctagtctcatgcccaaggtcatatagctaaaaatagcagagctaggatttgaacccaagtctgtctttcaccactattttcattattctatgcttcctgtcaagttttgcctagcttttcatttttaaaattggtctttagaatttgaaataatttgagatagctcacccatccccttcttgaaaaccagttgtgttagtgtttattttcattcattgttattatttctcaatcattaggattaggatatagactggatatatctagttggatatggaattctacatatgtcctttagatcaagcttattgtgttgttcaccttgtctacatatttactaatttttcatctgttatactatcagtaattgagagaggtatggtaacttcccatttttatggtagatttagtttttcctttggttttgtaagtatttgcattaacatattatcctcattttttagtagtaaatatgtataattgctaagtaagccatcttttcttttttttaattttttttattatactttaagttctgggataccagaatgtgcaggtttgttacataggtatacacgtgccatggtggtttcctgcacccatcaacccgtcatctacattaggtatttctcctaatgctatccctcccctagccccccacccccgacaggccccggtgtatgatgttcccctccctgtgtccatgtgttctcgttgttcaactcccgcttatgagagaacatgcggtgtttggttttctgttcttgtgatagtttgctgagaatgatacaaaccaccttttctaaaatatatttttatgggcatgggtcccacaaggatgctatattaagatacttcatctgagtcttgacacctcaggactaacacagaacaagttgtccatctgagctcagattctgacactcatgttacctgagccgtggtcttctcaatagataatcttgcctttttgactgtacacctgggactgaatgtaatgaagggtcttaagttttcttgggctttggtttctctattaaaccctagtagccataaattgggagtatccgattagtcatagcttttctaacttcacatctatctggttttcttattataactgtatttgtgcctccattattttcctgagttctagttttcaaaatatgatgtactatttaccataaaaatatatcacttggtttattgcatatgaaagctgtatttttctttcatattttcctttttgaatttctagagaacattctatgccatagtatggggagtagtgatggtagtgaggtaggaggcaggtattttcctctaagatgttaaggatagatttagtaccattatgatctcttctttgacatgtgggttatttagaagtgtctttataaattttaaaaaaaagtattgtgataagaaattaccttattttaaattgatttcttatttaatttaatttcctcgaagtcagagactggtctgtatgggaaggattttttaaaaaaattatgcagacttgcattacagcctagtacatggtcagttttgggagtaaatattctatatgtgcttgaaaataatgtaattctccagttggatatagactttttttgtattcctattaaatcaagctcattttgttgttcaacttgtctatatatttactagtttgtatctgcttgtaccattcataattgcaacaacaaagaagtatatgttaacctctcattttgatggttgatttttcaatttctctcttttgttcctttgtatatttagtgatgttttattagtgggtgcatatttattatctctatgtagtgatcttatctaacctttataaagcttttattgtcttttttacttttagatattaatatagctacctcagctttcttttggctagcatttacctggtatatcttttcctatctttttactttcaattttcccttcaatttatgttttagatgtgtctctcataaatggcacataactggattttttccttttatccagtctgttaattcctgtatttcaaagggtgaattttgctcatatatgagtttcatattcattgatatacttgaacttgtttttaccattttaccttttgttttctctttgtctcagttttttctgcacttacctttgtcttcttgccttttaatttttgttcttaatttgttttctgctcctcattactgattctgcaagatcccattgcaaacaagctggctgttaacagggttagtgttggaaacaacagcaacctatggtggaaggtggggcttggggtgggatatggcttttctgaaaggagtcagattggcaagtgatggggaagaggaggcagggagctgatagagtccatgtctgatggtcttacaaaaacctttttacaagtatgagacaagcatgtctgatgggactggagggaagggaagtgggagtgtgagatgaatgaaggcttgaatagaacccaaagggactaggtaaaggaattgaacaagcataagtaacagaatttatgggtgacaatgagggttcagctgaggttgtagaccaggaattatgtagaacctgggtataggagcagacaaggcaggctagagcattagcacaggtttgggattttcatgggcagttgtggcagagggatgaaggtatatggatatggaaggtactggtgagagtggttcaaatgttgagccatctggagtccaggatgggtatggggggaagatagatcagcagaaggcaagtggaccaagagacaatgtggggctcaagagactgtggtcttgataaagttgaagaacagatagagcaggagtgagctgtggttggaaagtgggaattcttgaatttaagatttcagagggggcagttctggttggtcaggtccataaatgaaaaagaaagggcagatgtacaatattggtagttccattttcttaagatactatctttatttcctcaaggatcttcttacttccctggattttgatattacttggtctcattattatgccaacgtgcctttctcatcacaatattctgctgcctctccacaagcaccagtttttaaatctgatatggttctcatttctagtgtgcctgtgctatccttgctttttagctgacaggtaactgataatacctcttttatccaggagccactgatttttttgcgcagtgtttcagccgtaatcacacatatgggaattcatttccacaatgcttttgatttgtctgtttagtactttatagttgctttggttataattctgcctagactgagcctgtagagcaccaactctggtatcagattgcctgggcttgaatccctgcaatttcacttacttgctctttattcttgggcaagttagcctaacctctcctgaatcctaatctatacaatgggggtaataatagtcactcattcttggtattgtggcaaggattaaattagttaatatatgttaggtacttgtttggcgtatagtcaattctcaataaaagatactgttggggtgacaatgacagtgattgcaatattggcagcatatgcaaaattgcgtaccagatattgcattaagtgctagggcagatacagaggagaagattgaaaaagtccttgttttcatggagggtatatattctccttggggataagaactaagaacacttcctcaagactgtctaagaaagggtgtgtgcaagaggcttaacatcttatagttcaataaagaccaggaaatatacaagttgaggaaatattgaggtttcaggaacctgtatagctttgccgtgttgtttatgttctccactgttttgtagggaactagtaaaaaaagaaaaagaaaaaataaagtgaaagaggcgtgttgtctagtttcaaaggagaggagagaaggtaagtgtgattctcatttcctttttcactctctgtctaccttgggctctttgactcccatgactaccaagtgtatattatcagatacattttttcttcctgaggtccagccctgtgtctccaactatttcctgggcccagttacctggatatcaagtatgcaacactaacttaatagggttaaaacaaaactttttgccttacttccaaacctgtttctttccttacatcttctattgctatgagggctgtcactagccagtcagttgtttaatcttgactgtgaactaggcatctttgacttcaccttcttcatcctctctgctcagtcagtctccctattctgtcaattctacttctcaaacctattctgttttttcttgctgcctggctcaggcctttatcattttagaagattcagcaagtatttgtactccaaacattgtgattggccctttaacacacattatttaattttttaaacaacgtttgaggtgggtcgttttgtagatgagaaaccaaagagtcagaaataaaatgacttctgctgggcacggtggctctgtctatagttccagctacttgggaggctgaggcaggaagatcacttgagcccaggaatttgagtccaggctgggcaacatagtgaaactctgtctctaaaaatgaaaaataaaatgaaatgaaaaataaaatgactggtctaattgtttagaggcacagttagtaaatctagattgtcttttgctgcagtattgtaataatatctctgcctcatttgtattgttttcttttttgagatataaatggaagatatatgtaaaaacaaattagaactatgtgaagtaaaaagtgaaagttgccccttcccaattctactccccaagggaaaccaatgatagtggcttttgttctagacctttctctttgcatatacaaatatttagataaattctttataaaagatcattttttattgtcctacaactactttttcactcatggccatatttttatgtcagtacgtgtgtatctaccacatttttaatggcgacataatgttccattatggggacatattattttgtttaatgattcctatgttaaataactgtttctgttcttacaaataatgttgcagtaatagtcttgtgcatatactcttgcttgtgcatttgtatgaatatttctattaggtaaattcttagaagtcatattgcttggttaagtatatgcctattttaaatgtatgtactaccaaattgtcctctgatttgtcctctaaatcagtctttcatattataactagagcgatatagctataatatgtctttgtaaagtgaatttcatcatgtgatttcccagcatcaaaaagcaacatcagagatgtttggtggatttctattgtctatgcagtaaattttaaaattaaaaaaaattttttccagacaggatcttgctttgttgcccaggctagagtgggccacatgtgatggcgtgatctcagctcactgtagcctcaacctcacaggctcaaacaatcctcccacttcagcctcccgagtagctgggaatgcagccgtgtaccatcatggctagctaagttttgatttttctttttgtagagactgagtcgccctgtgttgcccaggctggtcttgaactcctaggctcaagagatcctcctgcctcagcctcccaaagtgctgggattacaggtgagagcctccatgctgagccaaaattcttaaaattttaaaaaagtttttaagagttatgtaatctggtcccaaactatctttcctaccattcttccctaccaggaaatttgtcctctgataaggcaaaatccacctcttctgtgaaatttcccatgtatactgctctctttcctctctctatgcaagatagaatgagttgctttcttccctaagttctcatagcacttaatttatagtcccttataatccctctgatagcacttaatgcgttgtactgtatttatgtgtgtctgtctcccctgctactctgtgattttcataagggtaggaactgtgccttactcatctttgtatccccagcactttacacaatgcctgtcagcgtagtgctcaacaagtgttcatgaatttgggaaagatatcctggaggtagtgctagagtgctagtatgataagaactttgagagatagagtagggggtggaagttttgaagtatagcagaaagctgactgactcctgggagaatggaagctggttaggaatagacaactgggcttaaactggcaggagccttcatgtgcttttctccttcactgcagagaccagctgcctggttatttgggttaataggcttgagatttgagaacatttaaagtattaaaaattggatgattgaggactcacttggtggagggggagattgactcagctgttctatgttctttccagactaagatgcatatactgaataaccaatccttttcccagagtcacgaataactttttctttctgaaaaatcaaggactcttcattttcagggcatgtttcggatgggagtaggaagactaaataggtcagatacttctactttgtctctttagcttggctcaaggggaaaggaacctattgaaagggtttagggctgtgggcctattcttgagtaaatcatctgtgtgaaattagttcttttgtcatttcaggcaactctggtagctctccttgtctggttgttttgaagaaagaagagtagaagaaaaagttgagtaaatcatgtcggagttactggacctttcttttctgtctgaggaggaaaaggatttgattctcagtgttctacagcgagatgaagaggtccggaaagcagatgagaaaaggattaggtaagagttccccaaaacgcatggggtcccaggcctttgaccaatgatgtctgggcttttccttatgtctcccacctgactttcataggaatttgtatatgtgatgtttaccactacttattgggtcacgctgggctctgagtttgttgcttccacagaaccaaatagtcttactgtctttacctctcaacccctctccatccaatctatgcatatcctgaatccacttacgcttctgttttgggtcttggcaggcgactaaagaatgagttactggagataaaaaggaaaggggccaagaggggcagccaacactacagtgatcggacctgtgcccggtgccaggagagcctgggccgtttgagtcccaaaaccaatacttgtcggggttgtaatcacctggtgtgtcgggactgccgcatacaggaaagcaatggtacctggaggtgcaaggtgtgcgccaaggaaatgtgagtgtcacctatggctgagtagagagggggcgaggccttggccgtggtgagaatttctttcctcagcctttattagacaagaaccattctttatccatctgtcattttcttttatttcttcccagagagttgaagaaagcaactggggactggttttatgaccagaaagtgaatcgctttgcttaccgcacaggtagtgagataatcaggatgtccctgcgccacaaacctgcaggtactggacctgtctagagatggttcttggtatggaatcctagtgtattctgactggtagcatcttaactccatgggctcagccagttagtggagaatagaagattgtattgtcatcccttctgcaagcatggtgtatttcaggggatttgctatgagggttgtttcctttttcccctactcataaccaccaccctggcatacttttctttgtcttgaagtgagtaaaagagagacagtgggacagtccctccttcatcagacacagatgggtgacatctggccaggaagaaagatcattcaggagcggcagaaggagcccaggtaagaatcaagtaattgtttaaagaaatgcttacaatatccctttaattcttttactattctttttacttcttctgtttataaaataatagatgttcattataggaaaacttgaaaagtacagaaaatagtaaaggagggaaaaaatcattcctaatcccactactcatatgtagacattaacattttggtatatttacttagttctttattttttatagtttgcattcgctttctcaggttgaatagtttgttctttatacgaacaatttgaagacaaataaaaataacacatgctcattattaagcaacaaatcacccacattcctactaccccagttttcacattatgtgaaaattatttcgtatatcttctatgtatatacataacgggttgactggatggataaactgaaaaatctttttaatattagatcatagtataataaattaaaatcatcctatttaattttacttgaatttaacagaataaaacactgaaataaaatgaaagaatagctaatcttcagacaaatgtttttttaaagtaaaagatattagttgttaacattcctctaagcttaagaaaaaatattatgaaagccattgagcagttggtcacttttttagtggagtttttttggtaacagccttattgagatatatataattcacatactatacaatttgtccatttttggtgtacaatgcaatagtttttagtatattcactgagttttgcaaccatcccttgaatcaattttagaaaattttcatcacctcaaaaagaaaccctttacccttttagctgtcaccctccctgatccctaaacaatcactcatctactttctgtctctctgtatttgcctatcctgggtatttcatgtaaattgaatcatacaatatgtggtcctttttgacttgcctctttcacttaacattaacgttttcaaggttcatccatgttatagcatgtatcagaacttcattcctttttatagccaaataataccccatgatatgtatttatcacattttatctgttcatctgttgaagaacatttgggttgtttctactttttggttattaagagtaatgctgggccaggcgcagtggctcacgcctgtaatcccagcactttgggaggctgaggcgggtggatcatgaagtcaggagatcgagaccatcctagccaacatggtgaaaccccatctctaccaaaaaaaaaaaaaaaaaaaattagccaggtgtggtggcacgcacctgtagtcccagctactcgggaggctgaggcaggggaatcacttgaacctgggaggcagaggttgtagagagccgagatcgcgccattgcactccagcctggcaacagagtgagactccgtctcaaaaaaaaaaaaaaaaaaaaaaaaagagtaatgctgctatgaacattcattaagagttttgtgtggatgtatgttttcttttctttttttttcttttcttttcttttttcttttcttttctttttcttttcttttcttttgagacggagtttcgctcttgttgcccaggctggagtgcagtggcgccatctcggctcactgcaaccttcacctcccaggttcaagcgattttcctgcctcagcttcttgagtagctgggattacaggcacgcgtcactaagcccagctaattttcatgtttttagtagagacggggtttcaccatgttggccagactggtcttgaactcctgacttcaagtgatccacctgccttggtctcccaaaatgttgggattacaggtgtgagtcaccatgcctggcctgttttcatttttctaaggtggatactttggagttagccgtcattttaaaaatctgcctgtttcaatatttaacattatcagtgggcgctttgctgtgaaagaggaagcagttagctttcttacacttccccccggttattttcttctatccccactatttgttactcaaattatttttcctttgtcagggtttataatatttacattctcttatataaccataaaccatctgtttgttttatctgtttgtttccttttagttttatacttaaaaggattgtatgcttacaaccaggccttataccacaacttctctatttctgatttatttcttggttttctggatttcatcattgaggaggtccttcaagaagagcttgcaggtgctatatttattgtattcttacatgttaagaatgtctgccagctgcctttatacttgaatggtatcttggctggatattatattcttgggccacattttctttccctcagaatgttgtagacattgttccattgtcttcttccattgaatgtaactgtgaagaagtctgaggacatcttggcccttgtctttctttcttatggatgagagagagagagaaagagaaagagaaagggagagagattggacttgcctgaaaattttcttttctttttcttgaagtttagtaatttaagggctgggcacagtggctcactcctgtaatcccagcactttgggaggccgaggcgggcggatcacaaggtcaggagatcgagaccatcctggctaacacggtgaaaccccgtctctaataaaaatacaaaaaaattagccgggcgtggtggcaggcgcctgtagtcccagctgctggggagactgaggcaggagaatggcgtgaacccgggaggcggagcttgcactgagccaagattgctccactgcactccagcctgggcaacagagcaagactccatctcaaaaaataaaaaataaaaaaaaagtttagtaatttaacaaggttgtaactcaatggtgatcattctgtatcatttttccctatatgtgatatatccttgatgagttctttcttcattgctggaaaatttttctgtatcatgtctcagaactctttttctttctgttttattatttaagttctccacctcagagatactggattttcttatcctctatttttgtcattttcttttactagcgaatggaataggaaaaatggtgaaagcaattaactgtgattagcccaacccattcctccatgctattaatttggttttcagtttatttccctcccctaccccttttcccctcccttccttactttttgctgcttctaatttaattatttgagtaaattatcttatttaggttttgatttgttctttgctctaatcttctttctctcattttgttttatcatcttgtatttgaattcttgcactttattgaatttatattattagttcccctgtagtgtaaagcactcacatgaaacctacttgttttcctagggttaaattcttctccagactcggttcttcatccatcttgcaaattgttttcatttctctccacttcatggctatttatatatctgccagactattatttcattttactgaactttaatatgggaagttttgtctgtatcttttgtttcctctgatatagcatatgtgagttcttctcaccttaacttgaaacaatttatcttttccccattcccagctgtactttagtttaaggactgaatattgctttttatatttctttccttgtaacctgaaggggtaggtgcagaaggcaacttggagtcctgagttttggtctcatgaaattctcttaaatgtcctggttcagggcttacctgtcccagatctgggttaatcccctagctcataccagtgccctgggagatgacattttgcatcagtcttgtctgtctctgttgaggttctacagtggtacctggggctataaatcttgaggacttctgtttttcttgactactcactcacttaatctgcaaattgctacattggaaaggattagttaaggagctttgctgaattaaatcttctgttttcttaggtgcgatttttgaaatctgtgacttgaggctttatttttgactcatttggttgtggcggtgaatttttagcttttgtatggtgtgtgtgtggtttttttttcccctaactttcactcacccaaagggaaatgactttatcatgtttcatatgattgttgaaaaacagcatagaaatgtataaagtaagtcctccagtaacctcactgcttcttccccagataattatcgttaatagttgtgaatagttttggcatatggactaccaagctgtctaaatatacatatatgggttgggttcctaagtttttaatttctttttctttaaaggatgatactataaacatgttaagtgaaaaaaagtgaaagaaaaagaactttaaaaactcaataatacagacaatcccatagaaaatgcacaaaaaatttgaacagacatttcaccaaagacaatatagagatgtcagataagcacatgaaaaggtgctcaacatctttagtcattaaataaatttgacctaaaaatcacaataagatactactacatacccattagaatgactaaaattaaaaagactgaccatgccaattgttggtgaggatgtaaaacaactggatttaaaaaaaattttcttttctacatttcctccttgctattataaacaactagcattcttatacactgctggtgggaatgtacaatggcatagctactttgaaaagcagtttagcagtattttaaaaagttcattgtgcacctaccttgtgattaagtcatttcattcctgggtacttactcaagagaagggaaaacgtatgtttgtacaaagacttctacgtgaatgttcatagcagctttatttgtaatagcccaaccctggaaataacccaaatgctcatcagcaggtgaatggataaactgatttgtttatacggtggaatactactcagcaatggaaagaaatgaactattgatacacgcaataacatgaatgaatctcaaaataatcatgctgagtgaaagaagccaagcagtaaagagtacatactgtatggttctgtttgtataaaaactagaaaatacaaactagaaagcagtgacagaaagcagatcaacacttacaggaagggcaggagggattagaatggggcaggaggaaacctttgggagtgaaagatatgttcattaacttaattgtggtgatagtttcgcagatgtctacatttgtcaaaatgtcacgttgcacacttgaacatgtgcagcttatttatgtcagttattactcaaagcgtaaaagaaaaaaattgtagaaggatataacatgaacatctttctgtgtcagcaccaaggatctgtttcattcttttgacatctgtatgatgtttcattgtatatatggactgtgatttttatctacacagccttgggtgggtgactcatccgttccaggtgatgaggcccccttttttctttgtggattaaggataagaatggcttttatttgctgaacctgattaacacatctgacatcatcagtcagaatgtaatttctgaaacctattgcttctggttgtctgtgatctcttgtctcattggacccagaagactcttatttatcctaaacatgaaaacagattaagtgaccataaatgatctttcccatgaaattatggagcctcagagataatttaattcaaccaccctatttttgcagaaaagaaagcaggataagtgatttacctgagatcatacagatagttagagcccagggctcccatctcttagtctattttttactgcacagatgtcaaataattgcttttctgcccttgggttgtttgtattagctgtggattggtatgtattaatctttaggaaaaaaaggaaaaaccactctccatggaccattgttaaaactacctctctggaggaatggttctgcttgggtttttttggcgggggtgggggtggggacaaaaggggaaaaaggacaattctaaagtaaaaaatgaaatcaagcccccctgctatgtcttgtgctatacaagtaatacatctttcaaggaatgactgacatttcacctcttgtaagtactaggatttcagccctgctgtctgttttcacagaactgtcaaacatcatgtgacaacttggagagtttattctttactggctaagacattatagattttggttacctcattctttgtgcatctattagtttgtttgtttgacaaatatctatgaatgcctactatgtgccaggcattgttttagaccctgagatacactggtgaatacaaggcctcttgtttgtggggcttagatttccggggtgggagataaaaagatagtcaagtaaatgtatggtatatcagatgttgacaggtgctgtggagaaaatgaagtagaccaaaggtatagggagtgccaggaatgaatgtgtgtacatatactgtttaggatagccagggcaagtcttaacaacagggtaacgtttgagcaaagatatgaaaaaaatgagggagcaaacccttagggtatctgggggaagagcatgtagatagagaaagaaggaggtataaagaccctagggtgagattttgtttggcacttttgagtaatctgaaactgagtgagcaagggaggctgaggaaggagttgaggacagagatgggatgagaagcagatcatgttaagactttggtggcacttgtaagcattctgtcttttactccaagtaagaaggatggctctgaggggcacagccttattttgtcttctttttaaaaatggaggtaaagttgacataacataaaatcattttaatcaattttaaagtataaagttctgtgattgttagtactttcagaatgttgtgaaattagatcaccactatctaatttcagaacattttcaccatcccaaatagaaacccgatagccattaagtagccacctccatttaccccagcccctaatatgctttctgtcttgatggatttgcctaatctagacatttcatataaatgcagtcatgcaatatgtggccttttgtgtttggcttatttcaattagcataatgatttcaaagttcatccatgttgcagcatgtatcagaatttcattgtcttttattgatgaataatccattatatgaatataccacatttcatttgtctaatcatgcattgatggacatttaggatgttttcatcttttggctattaggaataatgctgctatgaacattcatgtaacatttttgtgtggacatatattgtttagttctgttgggtaggtacccaggaatggaattgctgggtcatatgatagttctatccctgatttacattttaaaagctcattttggctgttgagggaaagtcaaagccaagggaagaagcaggattagttaggaggctactgcaaccatccaagagctacatgatggtggtttggaccagagtaatggcagtggaggcagtgagaacgtatcagagtctaggtatacattgaagaggatttgctgacagatttgatttgtattgtgagaaaaagaggagtaaccgatgattcttagcgtttttgacttgagaaatgaaagggaattgccatttgatgagacagagcgaagagcagttttgggggaagattagggctttggttttgggcttgctgtgtttgagacatccacgtggagacattgaggaggccattggaaaaacaagtctggagtttgagtaagagataaatttgaggccgggcatgatggctcacgcctgtaatcccaacactttgggaggctgaggcggatggatcacctgaggtcaggagctcaagaccagcctggccaacatggtgaaaacctgtctctactaaaaataaaaaaattagccagccatggtggcacaaacctgtaatcccagctactcaagaggctgaggcaggagatcgcttgaacccaggaggtggaggttgtagtgagccgagattgtgccactgcactccagcctgggtgacagagactccatctcaaaaaacataaaaaataaaaataaatatatttgagttattagtttattgaggatatttaaagccatgagactagatgagatcatttagggataattctagatagagaggaggagcagcccaaggaagaagtttggacataatctaaatattagaggtctacgggaggaggaaggactagcaaaggagactgagaagcagcagccagtgaggttggaggaggaaaccaggagagtgtggtgtccggggagccaagggaagttatttgagatatttgaggaagaatcgatgttttttcccccttttcctgctgctctcactaattctttgaggtaaggggccgaggaaccgtatccttcccttgaaagatgagaactggtattttgaatgcccagagtcatccttcattaaggcgattaagctaaaaaaaagaattctggtcacctgaatactgtcttctagacatactgcttatttatggatatatctcagtcccactgagggcatttattcaataattcagtcaataaaaatacttgagtgcatactctatgctagtctctcttcaaggcactgagaacacatcagtaaataagatacgtggtcactgatcttatggaactttgtcgaatggaggagaaagacattaaataatttgtttaaattattgaaccaaataaataatttgtttaaaatacataaatagttacatatgtggtgactgttactaggaaatcaggatgctatgggagcacagaggaaggttactaatcgagacttagggtgggggcatggccagagagatctggaggaattgacatataaggagagacctgaagcaggagtagattgaggcaggtgaagaaaagtggccattgtgaaaagaatatcttaggcagataaaagagggaagatggagagcttcaggatattcagagaaacaaaataactttgtctttctaaaatataaagcttgaaggaggagtagggggtgaaaaatgagactggagagggtgagcaggggccaaatcatgaggatttcttgccatgctaaggagtttcagctaaatcccaacagcaatggggaaccactgaagagttttaaaagtatactgagggccgggtgtggtggcttacgcctgtaatcccagcactttgggaggccgaggcaggcggatcacgaggtcaggagatcgagaccatcctggctaacacattgaaaccccatctctactaaaaatacaaagaaattagccgggcatggtggcacgcacctgtagtcccagctactcgggaggctgaggcaggagaatggcgtgaacccaggaggcggagcttgcagtgagccaagatcgcgccactgcactccaacctgggagacagagtgagactccgtctcaaaaaaaaaaagtatactcagctgggcaccatggtacatgcctgtactcagctggtacaccatggtacagttactcagaaggctgaggcagcagggttgcttgagcctaggagttagagactgttgtgcactatgatggcacctgtgaatagccacagtactccagcctgggcaacattgcgagaccttatttcttaattaattaatttattatatgtttaaagtatactcatatttattttagaaagatcactcaggctacgattgtgaatggattggaaagaggcctgactagaggcaggagaacctgcttcctttcaatattggctcttggtttttattctagtgtgctatttgaagtgccaaagctgaaaagtggaaagagtgcattggaagctgagagtgagagtctggatagcttcacagctgactcggatagcacctccaggtggggttccccccatttccctcatctcctctcaacccaagttgtgattttgttctgcagcatcagtgttcctgacttctgtcctcaggaagttgaacgaagtattttctctgtcctcaacagaagtcttttcagtagcacgtctactgatttggctctgagcacagcttcctggaacacattgacatctctagtcaattcccccagtatcttggagtattcttcttagcccagtagcaactgatgctgctgtcccttaagaatgagggtgtgagtgtttgtgtttgtgcaaagttgcctatctgatcttctgcattccttccaggtaaatcacatgcgaagtgtaccttctgaatttggttattacgatgacccaagccattggctctccttccatagagctttgatccctgggtagaaggggaagggtaggaggtgacttagttataatttctgaatctacctccaggagagactctctggataaatctggcctctttccagaatggaagaagatgtctgctcccaaatctcaagtagaaaaggtaagcttcaggttattgagccaccttcctcccctcccttccttccctttctcctttacctcctgtctccctccgtctttccctccctccctccccctcactcttctcttcctctttcttccctccctccctccattctcttaggcagaatttaaatcaggaatttcaactaaacaaatttcagttcaaattcacttgggagcattttctgaagttttgtttgaaatgtgtgagaaaataggttttgtactatttctaggcatttaatctttcctttaagtttgtcatagtttagcgaaaatctgagccttattcttcttaagactgtccttccttactcactccttctacctatccatctgttcttttccattttcttgcccttgttccttcctaggaaactcagcctggaggtcaaaatgtggtatttgtggatgagggtgagatgatatttaagaagaacaccagaaaaatcctcaggccttcaggtaactggtttcccttactggtctttcaggactgaagttctgagtacccttgatgggctcttggtatggagaagaataggtctctttgatttggcttttttggtcttcccctcagagtacactaaatctgtgatagatcttcgcccagaagatgtggtacatgaaagtggctccttgggagacagaagcaaatccgtcccaggcctcaatgtggatatggtaggtgcccttatattttacttggtcactatatgaaattttacttatctggagttggctttagtacctgatattctcagtcaacctatttaattctttaagaaaaggcaacatgaaacttgatacccccaagtttctaaagtaaatctggttcctgatttgcttaaaggaaaggactgtctttgctatctcttttttttttttttttttttttttgagacggagtttcgctcttgtttctcaggctggagtgcaatggcacgatctcggctcactgcaacctccgcctcctgggttcaagcagttctcctgcctcagcctcctgagtagctgggattacaggtgtgcgccaccatgcctgggtaattttttatatttttagtagatatggggtttcaccatgttggccaggctggtcgcaaactcctgacctcaggtgatccacctgcctcggcctcccaatttttttttttttttttaagagacagcatctcactctgtttcccagactggagtgtagtggtacaattatagctcagtgccaccttgaactcctgagctcaagctgtcctcccacctcagcctcctgagtagctgggactataggcatgaaccatcatacccagctaattttttttttttttttgagagatgggagtctcactgtatttcccagcctggtcttgaactcctaggctcaagtgatccgcccgcctctgcctcccaaagtgctggaattacaggcatgagccatcacgcctgaccatctcttttattttctaataaattgctggatatatggctggggctcaaataaatacttcttttgattaaaatgtaaacagggttggggaaagtcaaatggaaaagagttatagcttctatgaaaaacattaaatattcttatcttattcttttgagatatgagaaggatggttggaatagagctgggaaccctgaaatgggaagacatgtaaaaagaaggatatgaggccaggcatggtggctcatgcctgtaatctcagcactttgggaggccgaggcaggcggatcacctgagatcaggagtttgagaccagcctggccatcatggagaaaccctgtctctactaaaaatacaaaaattagccaggtgtggtggcgggtgcctgtaatcccagctactctggaggctgaagcaggagaattgcttgaacccaggaggcggaggttgcggtgagctgagattgcgccattgccctccagcctgggcaacaagagtgagactccgtctcaaaaaaaaaaaaaaaaaagaagtatgtgtgcgtacacatacacatggcaacttggagctttaaaggaaagatattagtctttgaagctaaagaaaagtctttcttttattaactctgaatttatatttattgttccaggaagaggaagaagaagaagaagacattgaccacctagtgaagttacatcgccagaagctagccagaagcagcatgcaaagtggctcctccatggtaagttctattagatctgtggttacaggcatgttggggtactaggaagaaaagaagcacctccctagagcagattcgggacctggggaaaccatcctagtcactcttttcaggtaagtaagatcatttgtttgttcctatcctcaatttagactataggtgcttagtgtacatctaggtgacttcctgagcccccacctggagattattacattacagcttgggacatttttcatcacagctttgtgaacaataaccttaacttatcctctaaaggggtacccaggctatgaagtgagcaagatcagatttcttcatcatagcccattccaaattctcaacattaaaagaaagtgagtgtcatgagaggggctctggcagggttgatcgacatcagggtatggttaacaagcaataataccagtcaggataatgaatttaaagggaacatttaagaatcagggcctggttctgtcataagcatgaagattgatatttagggaaacaggaacaagggtgaacagaatttgttcacactcacacacaggaagagaatgtcagctcgcatgaccgattactaccagaaaggaaggtgccttttcacttctggtggggtttcctccctcccactcactcccagttctggccaaatctcttttctctgtaggccctgataagacataaggtggataagagaaacccacagataattaaggcaccttgttttagttagtaactaacccccttctagctggtgttttagtgtatataacacattccccagatggacttaactgcaccttgcctctgctccctgcccacctcctggggcaggtgaaaatgaacactaaaatttgtaaaaagagttgaggaagagaagctaagaggctaggtgagccatgagctgattcattcacctgaacaattttgagtgctggtagttctctcttaccctctgggtcaaggaatgtcagcagcactggcttattgcaggggcttctgaaacttctgttcagtgactgtggttttatcatgagggaagatgtgagcaatgcgggcgggggagtgtgccttccccagatgttcgtgggtgctttatcttcagagtacgatcggcagcatgatgagcatctacagtgaagctggtgatttcgggaacatctttgtgactggcaggattgccttttccctgaagtatgagcagcaaacccagagtctggttgtccatgtgaaggagtgccatcagctggcctatgctgatgaagccaagaagcgctctaacccgtgagtgcttctggaacctgactgatgctctgagaccagagaccagaccccggcatctgtccgggcactcttgaacagagcttatctgtttctgggggagcagggaggtgtaatgtaggaaaagaaccaggattgggaaaaagcaagaatggcatgtctaagagggcttgaggtgacatttttgacatcacatgtcaccatggcatatctatatggagaggaggaaagtgaaaagcaggcttgagaaaggccagcaaattactcagtgctgtctttggtttctagatatgtgaagacttaccttctgcctgacaagtcccgccaaggaaaaagaaaaaccagcatcaagcgggacactattaatccactatatgatgagacgctgagggtaagtatctagacctcaagggtaggagaacttgttctgtcttgtgccctaagctgtagctattcctctgcaacatgaccaggtgacacgggcttcagtgggccatgtctgtgtctgaggatacattgggtatctgttcacatcctgatctcccagtgaagagaacaaaggtgatctgcctttcctggattgatgtgaagtttgagattcacatggccacaaatctcatgtaaaaaagacatttgagataaggagtctccttggcagttctttttggacaatccagtgttatctcatccacttaagaaaaaatgaattttccaggtcctcctatggaatatggtaggtttttataaaatgagttaagttgaggctttgagtgaggaaactcaaagtgctcagggaacataaagtaatttggtattcaggactagtgacttcaggaatggttgctcaggttttggaataatcttgtctgaagaattacccttaactaatcatcttgggcttttactttcccttcacagtatgagatcccagaatctctcctggcccagaggaccctgcagttctcagtttggcatcatggtcgttttggcagaaacactttccttggagaggcagagatccagatggattcctggaagcttgataagaaactggatcattgcctccctttacatggaaaggtagtctgctttaacaactcctgcagtttggatctgaggtagaattgtctgcagtagcctctgctggtctatgttggtagcgtctttgaatgtagtcttctctggagttctagtgccccctgctggtgtttctgagtttgacagcaatttcagaggcatttgtctatcaagtgtgagttctgtgtaaaccaggcaaagtgtgaagccatggttttgctttgaaaaaattttcatatgtgtaccaaactttgtctcctaaccttccagaatctgggtgtatcctaacatcctaactcgcacctcttctccgagctaaccttctgtgtatatcctaatctgtacccttttgccaagccactgctttacttccaagtgggaagtaaagcaattcatggagctccaattgctatgctcttggttacagaggccagggaaatattactttggagatggcacctcgggccacagtgtagcagtatggcataatcatgcctgggatctgagtgcagacctgtgttggaatcctggttctgtcacttgccaactagatgagtcacttaactacaaaataatgtagggaaatcatctggctaagaagaaatagctaaaacagaggacttattcagcaacttcttgattatcagaactacacaatgacatgacaaagttcatcttatttttttttacactagcgttttaaatgtgggatggttttacatggtccatagactttgggaagttagatgagaaactagtcatggtggctgcctctaggaatggagactgaggtagaaggaatatttagttttctctatatcccctttttaagcatttgaactttttaccatattaagaaaattaagcaaaaatggacttatgtacacatgattcaaaattaaaacaacataaagtatattaaaaggaaagtaggttccattccttagaaataaccagtgttaacactacttgtgtatccttctagaaattttttatggctaggtatggtggctcacgcctgtaatcccagcacattgggaggcggaggcaggcagatcacctgaggtcaggagttcgagaccaccctgaccaacatggtgaaaccccgtctctactaaatacaaaaaaattagctgggcatggtggcgcaagcctgtaatcccagctacttgggaggctgaggcaggagaatcgcttgaacccatgaggcggaggttgcagtgagccgagattgcgcctttgcactccagcctgggcaaaagagtgaaactctgtctcaaaaaaaaaaaaaaaaaaaagaaagaaagaaattttgtattaagcagcacagatatgcatccatgtatttatatgtatttttttctttttttacacaaatgggttcacatggacctcattgtacacatttttttttttcatttatcatgggcatccttttgtgccatcacttacagatctatctcattttaattgctgctgcatagtattttttcatgtgcctgtattataatttatttaccattcccccactaataggcctttaagttgtttgaattcttttttgctcttaaaactatgctgtaatatatcttggtcttcttttgtgaatgtaactgtcagagaagttcctgttggtggaattgctgagtgaaaggaaatataaatccaatattttgatagctgttgcccttgcaaaaaaaaatagtgacaacattaaatttgtccctttaaatactaataaaaacaggaatttgttcaacagcacagtaggatgactatagtcaacaaaaatatttgtatttcaaaatagctagaagatttgaaatgtttccagtgcaaaaaaatgataaatgttcaaaatgatggatgtaacaaaatatcacatgtaccccataaatatatacaaatattatatgtcaataaaaagacaggaaagaaattattaccaaagtataacatattattacaaatttagaattttttaaccatttggcacccaagtcattctctacggtcaatataattatattggaaatgtcactgtaaaccatcatgaactactgccaataaaacttttatataaagagaagaaaccacattaacatggaggtctttgctctttgtaaatatttggagccagaataagaatgtgctactaaaacaaatatgccagtttctagctaatgctaaactccaatttttaagagtccactgaagttcacagaacttttctaaaaaataattttctagaaattaataaattgtgtagacattttataaacaacagaaagaccattcccatattatatatcgattttaacttctacatttgttgtttctggttttgtttttgttttttgttttttccctagcaatccatttgctcctattcagttttcccttgcctgcatctacctcccgattcttttgtctctctcacatatattaaactgtgtgttctgggtatgtggtatgttgatccaaacttatggggattatgccttcctagcattggtaaggacctaagttagaggaaccccaattaacacaggcaaggccaagtgcagtggctcctgcttgtaatcccagcactttgggaggctgaggtgggtggatcgcttcagctcaggagttctggaccagcctgggcaacatggcaaaaccccacctctacaaaaattagctgggtgtggtggtgtgcgcctgtagtcccagctactcgggaggctgacgctggagaatcacttgagcttgggaggcagaggttgctgtgagccgagattgcgccattgcattctagcctgcctgggctctgggaatgaaaccctgtctcaaaaaaaaaaaaaaaaaaaaaaaaaatacaggcaggtgaaagggcacctctagtctgcaccagctcatgctctggatactaaagcacaaggaacaaagtcatgccgagagagccaatcgagtgaagcagttctgccaatcaaagccaaagacaataggccacctgctgctcatctcagacattcattcgttcactcttaccttcattcagtaaatatttgtggagcacctactatgtgccagatactttgctaagtgttgggcatactaggatgaacaaaaataggcttgatttctgtctcttggcacttcggctgcagtgttagagacagacattgatcaaagataacttaaatgcaaaatttataattgtggcaaatccaaattcgtgtaacagagtttcacctagccctcaaatctttgcaagccctccttttttctttttttggggggagggacagggtctggctctgtcgcccaggctggagtgcggtggtgcgatcttggctcactgcaacctccgcctcctgggttcaagtgattctcatgcctcagcctcccaagtagctgggattataggcccacaccaccccgtcggctgatttctgtgttttttgttgagacaaggttttgctgtgttgtccagactggtctcgaactcctggactcaagcatttgcccacctcagcctcccaaaatgctgggattacaaatgtgagccactgcacctgactgaaagccctctttttttttttcccctgcaagccttctttttaaaaataccttgtaaaaatactttgtatttttaaaaaccatacaaatgatatatactattctcattaaaaggacactaaaagttaatatggagtaaaaaagggaaagttgtctttcatttccctattctgttgccctccctagaggaaacgaggataagtttgttcgtatcctgggtttttctatgcagtgtagtataatgtttaaaagcacggactctggaaccagtctgtctgaatttgaatcctagctctgccaattactaactgtgtgaccttgggcaagttacttagcttctctgttcctctcttccatcagttgtaaaatggagttaatagtacctgtctcatagagacagtcatcaaacaaaatgatacacctaaagtacttataacagtgcctagtacatagtaagggctaacataagtgataatggcaatcgttatttacatacatttatattcacatgtacaactatgaatatattttaatataagtggaacatttttctgcatcttgctttgttgacttaaccctatgtcttggatatctttccatgtcagcatgtacagattcactgaattcttttttgatgactgcatgccatatgccataccaggacactacaattattcatttaactctttctatagtgattgacatttaggtcgtttccactttttggctattactaacaatgctggtagcaagattctctgtcatgctgtcagtccttcgtgagtttgtatggcaaccttgcttgaagatctttgagagtatttggaatctagtaactatgcccccaaagtggcataatagtgggtattgcagaagactctttgttggttctgccctatttccttctaaagaaactgccatagaaacctgtggctgccatggcctagggacggtggattatattcatatgaagaaggatcctcttttgccctgatgctgttcttggggggtaattttagaatttttttcagagagaagtcccaacaattcttgagaagcccagcttgacctgttgggtttccctgtgtttcagatcagtgctgagtccccgactggcttgccatcacacaaaggcgagttggtggtttcattgaaatacatcccagcctccaaaacccctgttggaggtgaccggaaaaagagtgagttttctttggggtcctggatgtagcttagtcttctgcataggatctgtgcaaggccggtgctggctactggttagcactgttggagagaccaaattgggatgctccctggatctgctagggagattcctttactaaggaagcctctctgcgttttttcaaacagaagggaatgccttagggttggcattcttttctttttttaggctattaaatggacttggtcttggtccagctgtggcaagctactaagagggcagaagagaacagaaactttggggctgagaagggtggctgggagaggtggtaaagtatgaaggacaggaagttgaaagctggggaagagtaattcaacatgccagctgctgtgttagtgactacggttgtgtagatgagtaaaacatatttgctttcccttgaggagcttaagtttttgcaagaaagacagtcatgtgctaaaaggacacagatataggagtggtgaattatgtctggttacatttgggagagctttgaagaagtaacattaaaactggatcttaaaactttaccagacagaaaaggagcaggatgaggagagaagagcattttcagaagaggggataacatgcgcaaaggttttaaaaaggcatggtaatgtggggttgtatgtgagtgtgtcccttattttagtgggactggagttctggtacactagatgtaggtgtggggctggagttggacatgaggtgggagcctgactgaagagggccttgaacttaatgataaagagtttcacttgatcccttggcaatgtgtggcctacgttctttgaaaaaatatacctttggcagagtcacatctagaaggtttgggggaatcaatgaaatccccaatgagggtatgtagcatgactagagaagagaggcaagtatagaaccagagagatcagcaacattttaaaggatgaagagagaaagaaacaccagtgaagtaaaaggttatcaggagagagcttcaagaagaaggggcggaggttatcaacagtattgaaatactacagggaggtcagaccagatgaggtctgagaagacatggccaattggcattagattgcattttcagtggatcagtgaaagcagaaaccagatttcactagaaactaggctgagtgaatgggcaaagaagtagaggtggtaagtgtggactttttttcctcaggataattgatggtgaaagaaagtagagacatggagaatagcttgaagaagagataaggttaaagggagcttttcttttagaagtactttttcaaagagatgagattagtatatatttagactgaggggaagggacaagtggagaaagagatatttaaattgggaggtgaggattgaaattgatgatgtctgaagagtcctgtgaagtaggggtggaatcgagaactcagatggaggagttccctcttttttaaatcattgaacaaatatcaggcaactttatgtctctaagcctcaattttctcatgtacaaaatgaggacaaaaatagtgtgactctcctagggttgttttgagaattaaatgcttaacatggtatctggcacatagccagttttcaataggcatttattaatattgtggttgttattaatacagcacctattgcttactggcaggcactgtgctaggcactgaggagacaggacaggcacggttctgttatggagctcgctgcctttaggagcaagcaaagaaagtgctgcataaacaaagctcaagataaatctagaggtggaaggggctcacttgctatggctgacatcccttacaggtaaaggtggggaagggggagagctccaggtgtggatcaaagaagccaagaacttgacggctgccaaagcaggagggacttcagacagctttgtcaaggggtgagtccctagaccagccccaaattaaccagtttcagaacaagagagctaagagaagaatttaactttctctgtggatattatccagtgtgtcttaccactcccggcaaccaaatttgttcctgaaattaggtaatgacaaaaccttcaccacctttgcactggtctgggctgtagacttgataatccaaagaggagggctgcagacaggttctgacttttgtctgactcatgttcttaattaattctgggtgaaaatctgtgtcttctgactgtctagatttgggaactcagggctttgtttcccacagtttttaagctttccgaaaattacagattacctactgacttaatttatctagaaatcatgtttggctaagtttatagatattactattggttttatttaaagagataaattgtctagtagaaacaaagccaaatatttaaaacccattttcagtggagcacagaatagcctcactaatactattatattcattttctctctaggttaaaggaattgaatcaggtgaatgatctagtagaggtagtgggaactctgcttcagcagattcaaggaggggcgtgtgtagtaggatctggatgtgggttcatcttcttgggctaggcctgtggtaggggaaaggggaatttagagagataactgtccgctttgagtaggctgttgattactccccgccctctgccagatacctccttcccatgaggaacaaggccagtaaacgtaaaactcctgtgatgaagaagaccctgaatcctcactacaaccatacatttgtctacaatggtgtgaggctggaagatctacagcatatgtgcctggaactgactgtgtgggaccgggagcccctggccagcaatgacttcctgggaggggtcaggctgggtgttggcactggtgagatcccctcccccatcctcacttgtttgaaggcttcttgtctattttactcctattaccattcccgccccccaacacaaagctcctctgtgatgacagttgtcttctttcctttcagttaacattcagccaatacttattgagtgcctactatgtgccaggactaggggaaggctgagctcatgcactgatatgtgcacagataaatgtgaccctgattgccaggaacttcataatcttcccaccaaaaaaatctacaaacctacctatatgtatgtacctatacattccatcttccatgctgttaataatgaaagaagggtcattgctagcaaaagccaagctctctccaagtgctctgggccacctccccctacccttctcgatgacctcacttctataatcgtcatctctcagtttcatcctccctacctaccaggggtgaatacagatatgctctggtatttccaatcttatgaaacaaaaacaaacctttccttgactacacgttccccttctagtttcttagaaagaattgtctccacttctcacctctccttcagctctccttcactgtgatctggcttttgtcccaccactctgctgagcagttgctcttgccaaagtgttgttctcatctcactagaattttcagcactatttaacatgctagatcactccttttcgcttgaaacgctgaacttctattgacactgcattctgattcccttttaagtcactgctcaccccttctcagttttctttgtaggtgctgcattctatacccaaactctaaatgttggtgcttggcagagcttagtctcggatcctcttctttgccctctccctagtctctgcacttgtctattaatatacttatatattaataatcacacagaatatttaacatgaagcatatagactgatgtttttacacatgtaagccaattcatgtcagtcccctgttaaaacccctcagtggctttctgttgtgcttagaaaacaatccaaagttcttaacatgcctacaggcccctgtgtaacctgggtcctctgttcctttctgatccgtcttgtatcactcttccccttgctcactatgcttcaaccaaaatgactttctgctctccaaatataccaagctcattcccacttcagaacctttgcaattattgttttctctgaatggaaagtctggttctttcttatccttcaggtcttggctcaaatgtcaccttctcagagagtcctcagaccactccatctgcacagtagttcctgagtcagtcactatacatcaccctgtttatttacatcataatgttaacctcactgtctgaaatactcttattggtttgcttgtatattttctgtcttccctattcaaatgaaagttgcctgaggacagagactttttctgctttgtttactagtgtctctagagcctagaagagtacctggcacacagtaggcactcaataaatgtttgctgaattaatggatgaatatataagagaatatgaatggggccacatacgatcctcacttctgacctggagtctgcagctagaggagaggtgtttagctttaaaagaaaaaagttggccgggcacggtggctcacacctgtaatcccagcactttgggaggctgaggcaggcagatcacgaggtcaagagatcgagaccatcctagccaacatggtgaaaccccgtctctactaaaaatacaaaaaaattagctgggcgtggtggcgcaggcctgtagtcccaggtactctggaggctgaggcgggagaatcgcttgaacccaggaagcagaagttgcagtgagccaagattgtgccactgcactccagcctggcgacagagcgaggctccgtctcaaattaataataataataaaagaaaaatgtttaagtacagttggcaatagctctggcatgagttgtcaggcactagaactctgtaacagcctcagaataagaagtctctagtgactgtgtgccatttggagtctgatttcatcaacccagagtctcttgacagagtctcaggaatacaggtgagggagcacttcccagactgctgtggccattagcccatcttcgtaggaaactgttatggggtggctaatcttgctgtacaacccatcttccctggtgggctgagagtggggcccctctttagcctcttctggtgtttctcctcagggatcagtaatggggaagtggtggactggatggactcgactggggaagaagtgagcctgtggcagaagatgcgacagtacccagggtcttgggcagaagggactctgcagctccgttcctcaatggccaagcagaagctgggtttatgagtccctgtcctcttctgcaggtccagccctggcgagggcaggtcagaggaagtgaagaaatcaagagcaaagatttataatttaatgtgtatgtgtgtatgtgtgtatgtgtgtgtgtgtgtgtgtgtgtgtatgtgtacaaacatgtattttctgcaaatctcattatgctggctagagtgatgcagacttgttcttctttttaaagcagtctcaagaataagcatttctttaaaatgtttctgtgtataatctagtttattttcagagtccattttttcttatgtctttataaggttcacttaacttaaaaacagcttttaaaacaactttttatcttctgtcttgctatcattgttcctacttccctaggaagccctggctacctttcgcattaggaccagtctgggttttaaggctctgggaagcagggttggttagtaaagacaggaatgttggggagaggtgagtagttccttcctctttctcctctccaatttatgcttttaacttattttctacctggataaacttctggaacttggcttttaaatttaacttttctagtttttaagcagtttccaccttgctttggtctaatgcttttctttgaaatgctaacagaattcccaagctttttccagttctagatatctttactagacctttgggggactcttataatggagctgcttttgaaaagcactttaattagataatgtattttgactaaatcacgaggatgcccagtgagagcttctagctgatctcagaggaccagagtgactgagggtaaagtgtctcacagcccatgctgaattttctgcattttaaactgatactgcagtcattggagagagagctcctcatttctcgaatgaaagatgagatatattcatcctcatgtaccacatctgtcttagtgtttgcgtctggggtgtgttatcaaacagagcatggtctacatcccactgtgtcaaccagaagagccaagtgttatctcaattggcccagtgtttctccaggctggggactgttaagggctctaagggaatgtagacagagtctccctgttattctgacttcctgcttgatgagctttcagttcctgtttttgctattgtttcctaaatttgacctacatattacatgggtgtagtgtgttgaggcttttcaaagaagggtctagtgagctaagtttcatcttctggtactcattgatcaaactgacctttctattctcataagcgtttctacccaaagttgtgtgtggaaggagtgtatagcagagaggaaatccctttcaacagagtcagctgctaactgatttcctataagcacactggattaagggcagccacagtggtttctactgtatgtatgaaccgaatggaggaatgttttcaaagattgatttggtgtggattgcaattgtaatggaaggcataacttgggatcccgggctgtaacttgctcttttgtttcccacccccctgacatgtatgtgtgctttaataaagctttctcacttgtcaaacgtttgtgtttgttagttctataaatgcttttgtctctgatgtcctcactgttgcttttcccctggcttgaaggataagaaccaaagtgataaatgctcttccctaaccatcctatgctgattgaagaaaattcacctttccccgcattgctgcctgataccttaaatgcctgatactttcgctgagcttgatccctcgtcctttgtatttggtatctaaggagaacactgagaaatcatctttaaagtggcaccacttttctatcttgtaacaaaggaactcttcctttagctttgcagaccctcctatactggaggaaggagagagatgttcatacaggaggtgaggggagacattccctgctataagcacttctttctggatccttcaatttctctgggaggcggggactttttcttttactcctcctaccattatgtagttttgagagagaaataacacaggtgccaagtaacccagctcagaaataaggctcttgatttctaggtagaacccaagcaattcttgacctcttgtgcaaaagggcattaatatatatcaaatgctttttatgtgcaaggcttcatatactatttctt

SEQ ID NO: 2 - DNA, 3312 bp, Homo sapiens
gggtcaggtaagtcctggcagcctggaagccaagctagtcctccatcccctgcaggtcccaggaacctgcagtgctgtctcatcttccttgcccctctagccttcggtcccttttggaaagaggcatgtcacaccccacgccctccctggcctccgcccctctcctcctcccatcagctgtcagtgctcaggcaggctgctaggccttaggcagaggcagctgcgctgagacgccccagtccaacttcagttcttggaacccctcctccgtgctaatactgggctccagccgacagcagttacaccaacctgagcctggaggctactcctccgtgacgtttctgtcccgtgctgccctggtggggagcagagaccgtgccaagggctcactggtgacaaatctcagccctctccccaaaccaccccagcacgcgtgtgctcatcaccgagacagccctctcgcccctccccttccagccagccagccagccacccactcttccaggcgagaatcctgcagcagctgcgctctccctcctgggtaggactcttctttgatgcgccctccagtgcctggcaactaggaggcgctcagcaaatgaccatttcccacaatcttttattaagaaaaattccaaacatacagaaaagttgaaagaacaagtacactgttcactgaaataccagccactgcagattcaacaatgaacattttggccttatttgctttgtgtattttggggggaactatttggaattaaattacacatttcttgaaggcattcacctatataatccagcatctatctcctaagaatgaggacattttcccatgaactgcagtaccgttaaatggctattagaggaatggttggtctttgtgagggtctcacgtccaggaacctcatcaaagtgtgctaggcccttagcagagagggtagaacctgctcgccggctccctcaccttctctcccatcccagaaaggcagaacaggggcaacacaggattctggagagctgtccagatagaggatcacaaacatgagctccacctgggaaacacagacagccccaatcccacccccacaacaagagcaggcaacctgggtccaaattcagaggacaccacagccggcagagggctgcagcatgccaggtaggacggaagtcgctgggggtggggatgagcaccagcccctagagcctggaatagcacccggcgtgggctacagccctgccccacccacctcacagctgctcggctcacccatggcactgccaaagcagcaggcttaagccgccaaggcgggcacatgaagcctccatttccaggtccaggggtcaggcaaggagatctccttcagggctgggccctgcctcgccagctttgctggtggaattaaatatagcacagggagacacagttgccaggcagaagcaggaggtgctgtgaatagaacagtgccctttgtggtgacaaagctatggggagcctgctgtgcatgtgccaagacctgcagggcagctcccccagcccccacagggacctctgagctgcatggttttgtccccgcttcacatgtgaaatatctgaagttcagatgaagtcgtttccccaagatcattctgccaagtaggagagcctgaatgcacagtctagagcccacgttcctgccaccgactcacaacagccccaaggtcttcaccccagacgggtcccgcgctgagacccaggctctgaaccaccgagtcttctttagtgtttctccgctggccctggctcacgtttgcccactggcctgttgtgaatgcccttgcacagagtaggtgcttctggaagcatctgatggagggtgactgcggagccaggggccgtggcagcagggggatggtccagcacatcaggcgggcctgagaagggtcagagcagagaggcggtggagtcgtctccctctagagctttccttcgctggctctgcaggaggctctggaatgctgctccgggagcccgctgggcacggggacacaggccaggcctgcactgctgctccctgccccgagctgcctgcccagcccgcattttgccaacttttgtgagcctgagcagttggttctggttcaagggctctgagctggcacagccccaaaccagggcctcttcctgggcctcaatgaagcatgcccgtgagtcagcactgagacgcaaactgaacaacaggcagggcgagtggaacgtgggatggggagcaaaggctggaaggaggggggctgggcccacacctggaagaacccacatccttgcagcctccggtggctgcaacatcttggcccctgcagatcttttcagaggtccagcacaatgactccacagagggctgactggttccatgatgcttaagaggttaggaagcttgtaggaggcacgcctgacttgccactccctccacccaggcctgactatctgaggaccaattcacacacctggagccccgagtagcagcctgaaggaatgctaaggaggtaggtgagggagtggggggcaggcccttgcccccatttcttgattgtataacacttcattaaaataaaatcacgcagtgccatcttttattagacattttaataccatatcaaaacaccttgactaatgaagaaagcttttctcccaagctttgaacatttttttaaacattttataagtttttttttgtattttaatatataaatacagaaacctatcttgcatgggctgatgccacgtgtgaacatcaatggctaaaatgttctcaaacatagtgcctgaaaacaggggtagctgtacatatttcttagtaagtctttttttgtttaagttttctgaaaaaaaaaatccacgagggcctaagaataatgttcaggcatttttgcaggacacttgtgattgttaaatcctctgaactgaccggaaccaggaggaaagaagggaaaagagatgggatcagtaggaagaaagttctcaatgggttgttttttggcaatgaagtcaagatattagggtctcaaggggagaaaagagcaaaaaaccagccagaaaaatagagggaaaaaaccaaacaaacccaaagtagagaagttggtggtggagagggccagttggggcaggggaagagaccgtgtgctcgcccgccgtcagaaggctggcagcgaggccttagctgtgttcgtctgtcactgagtgggttatggctgggcagcaaacagcaagctgtaaacatcacgagggaaaacaccagtcgacactagactttttttttatataatttttttttgtaa

SEQ ID NO: 3 - DNA, 1594 bp, Homo sapiens
ctgtcttttttttttttttttctgaaacagagtctcgttctgtcacccaggctggagtgcagtggcgtgatctcagctcactgcaacctccccctcctgggttcaagcagttctcctgcctcagcctcccaagtagctgggattacaggcatgtgccaccacgcccggctaatttttgtatttttagtagaggtggggtttcaccatgttggccaggctggtctcaaacttctgacctcaagtgatctgcctgtctcagcctcccaaagtgctgggagtacaggcatgagccaaccgtgcccggccaagctcagtattttaggactagcctgggcaacccagagagacctcggctgtgtaagaaataagaacttagctgggtgtggtggtacatgcctgtagtcccagctacttgggaggctgacatgggaggatcactagagcccaggaggttgaagctgcagtgagctaaggtagtgccactgtactccagcctggatgacagagtaagaccctgtctctggaagaaaaaaaaaaaaagaaaagaaatcaggggaaaaagctaagacaagctttccttggggggatctaattagtacaagctaaaggtgatgggcttccattattcctgtaggctgaaagggctctctcctgaaaaccatctacacagaaaacggaagaggtatgaacccttgctgagtgtttgtgcatgtttgtaaaaggtcttttaaaacaatgtgtatttagggttttattttctcatcttgattcatgagcctcagatatgcaacatttaaaaattattgatacataatatttgtgtgtatttatgaggtacatgtggtattttgttacatgcctagaattacaatgattgtgccagggtatttggggtgtctgtcgcctaagcatttatcatttctatgtgtacagaacatttcaagtcttctcttatagctattttgaaatgtataatacactgttgttaattgtagttactctgctctgctattgaacattagaacttattcccttttattcccccttttttctttttttttttttttttctttttttttggagacagggtcttgctctgttgcctaggctggagtgcagtggcatgatcacagctcactgcagcctcgagttcccgccgcagccttcaattcccgcctcagcctctccagtagctgggactacaggcactcaccaccacgcccgggtaatttaaaatttttttctgagatggagtctcactctgtcgcccaggctggagtgcagtgacatgatctgggctcacggcaacctccgcctcccgggtttaagcgattcttctgcctcagcctcccaagtagctgggactacaggcacacaccaccacacccaactaattttttctgtattttttgtagaggtgggattttgccatgttggccaggctggtctcgaactcctggcctcaagtgatccgcccacctcagcctcccaaagtgctgggattacaggcgtgagtcaccgtacctggcctaatttttaattttttttttaatagagacaggatcttactatgttacccaagctggtctcaaac

SEQ ID NO: 4 - DNA, 191941 bp, Homo sapiens
tttcatcgatttgaaaattagaactccgagaagaaactcaggtaagaatgccattaaaatagttttagttgtttttgaaaataacatcaacaaaatgtcactattaaacagtgaaattggaataaaaatttgttttatgagtaacacggagatagcatacaaacattccattgactaatacagaaaaaactcaaaagttttaattagatatgtttaaatagagatgagaaaagtcaaaactttaactcttaaaagttatttttatcagtttggaaatatataaactcctccctatataaaatacaccagcacaaatttctctagtaaggattggggtttcatgactttagatgtatttttctgtaatattttaatgacgcacttatattgacgcattttaagatagagtttaatgatatattttgactagagataagtgatttaaagaataagaatcatgtcattgaaagtgagaatacttgagaaatattgacgaatataagctaaataaagcaaaacaaaataaaacacttaccctttcatccacatgatgtcgctggacaccggaaggtttttctcccttcccagcctcaaaggaatacagtgagtagattttccttagacagaaaggaaaagaaccttccatttttggctgtgccaagaagctcagaaaggcgataatataaaaaatatatagttaattgggaattgaatttacaaaatacattgtgtggtgatgcaatagaaagctcataattggaacgagattgagatggtatattcccggagaggaagtctgggatcccggctcctgctgctctggcttctccttgcctactggaaggcagggagcggccagctccactactcgatcccggaggaagccaaacacggaaccttcgttggccgcatcgcgcaggacctagggctggagctggcggagctggtgccgcgcctgttccgggtggcgtccaagggccgcggggaccttctggaggtaaatctgcagaatggcattttgtttgtgaattctcggatcgaccgggaggagctgtgccggcggagggcggagtgcagcatccacctggaggtgatcgtggacaggccgctgcaggttttccatgtggaggtggcagtgaaggacatcaatgacaatccgcccaggttctccagacaagaacaaagattattcattttagagtcaagaatgccagattcgcggtttccgctagagggcgcgtcggatttggatattggagcaaatgcacaattgagatacaggttaaatccaaacgaatattttgacttagatgttaaaacaaatgaagaagaaacgaactttttagagctggttttgaggaaatccttagatagagaagaaacacaagaacaccgtttattagtgattgcaactgatggaggaaaacccgaactaacaggtacagttcagttgttgatcaatgtattggatgctaatgataacgccccagaatttgataaatccatttataatgtcagattgttggaaaatgcaccaagtgggacattagttattaaactgaacgcctcagatgcagatgagggcatcaataaggaaatagtgtatttctttagtaatcttgttcttgacgatgtaaagtccaaatttataattaattctaatactggtgaaataaaagttaacggggaactggattatgaagactataactcatatgaaattaatattgatgccatggataaaagtacattcccattatcaggacactgtaaagtagtagtgaaactcctggatgtgaatgataataccccagagatggccataaccacccttttcctgcctgtcaaagaggacgctccactcagcacggtcattgctctgatcagcgtgtctgaccgtgactcaggtgccaacgggcaggtgacctgctccctaatgccccacgttcccttcaagctggtgtccaccttcaagaattactactcgttggtgctggacagcgccctggaccgcgagagcgtgtcggtctatgagctggtggtgaccgcgcgggacgggggctcgccttcgctgtgggccaccgccagcgtgtctgtggaagtggccgacgtgaacgacaacgctccggcgttcgcgcagccccagtataccgtgttcgtgaaggagaacaacccgccaggctgccacatcttcacggtgtctgcacgggacgcggacgcgcaggagaacgccctggtgtcctactcgctggtggagcggcgggtgggcgagcgcccgctgtcgagttacgtttcggtgcacgcggagagcggcaaggtgtacgcgctgcagccgctggaccacgaggaagtggagctgctgcagttccaggtgagcgcgcgcgacgcgggcgtgccgcctctgggcagcaacgtgacgctgcaggtgttcgtgctggacgagaacgacaacgcgccggcgctgctggtgcctcgagtgggtggcaccggcggcgcagtgagcgagctggtgccgaggtcagtgggtgcgggccacgtggtggcgaaggtgcgcgcagtggaccctgattcgggctacaacgcttggctttcgtatgagctgcagccagcgcctggcagtgcgcgcatcccgttccgcgtggggctgtacacaggcgagatcagcacaacacgctctctggatgagaccgaagcaccgcgccaccgccttctggtgctggtgaaggaccatggagagcccccgctgacagccacagccacagtgctggtgtcgctggtggaaagtggccaggcgccgaaggcctcatcgcgggcgtcggcgggcgctgtgggtcccgaggctgccctggtggatgtcaacgtgtacctgatcatcgccatctgtgcggtgtccagcctgctggtgctcacgctgctgctgtacaccgcgctgcggtgctcggcgcagcccaccgaggccgtgtgcacacggggcaagcccactctgttgtgctccagcgcggtggggagctggtcgtactcgcagcagaggagacagagggtgtgctctggggaagctccacccaaaacagacctcatggccttcagtccaagccttcctcagggtcccacctctacagacaacgtgagttttctaatattaacatccatctttccctcccaattttcaaatattaaatgtcacattcacccactttttttgtatttaaaaattatgtcttagtacacaaatattgtggtacacaattattgcactaattcatgtattatatgctttttatgaggcttttctgctggggtaatagattcatcagctttctgtgatattaagtgtttttaaaataatattttatattagcatttgaattttgcatctctaaaaatgtaggataataattgtaagacatagtttggagtcattctcaaagtttcagtttatgactacatgaaaatttattttattttattgttattttttagagaccctttgttgcttagtctgcagtgatctgatcatagctcaccgaagcctgaaactcctgggctcaagtgatcctcctatctcagccgcccaagtagctggactacatgcacatgctaattaaagttttttttttttttttttttttattttctgtagagataggggtcttgctactttgcccaggctggtcttgaactcctggtttgaagccatgctcccgtctcagcctcccgaagtactaagattacaggattgagcaagagtgcctggcctataaaaatgttttaacaccacccttccaattttgcctttttgtttctattgaatttaaattaattattattttattacactaatttagtttgttttcaattgtatttttgcagcatatggtttatttcaactttgcctaagcagttcacctgtatacccatgatgaatttgataattgtaatttaaaaattatatttttcattttattgattttttgaataggaaacacatatacatggtttactgttctaaaggtgcaaaagaatacagttaaattttccctttcacctccttcatgaagccaaaacattctctggtatccttctagagatttttttcatatacaaataaacttccctacccccttaaaaaacatatgagtattgattttaatcttgcttttttcatttactaatgtatcttgatgatcatgaattatcattactgaagtagatttgtttttcttttatctggatctatggtgttccattgtgtaggtatgtgattggttatttttcccttaacattaacatttagtggaacaatgatttaattttctggaaatttgcatatttttcaatatatctaatatatattagatatataaatatctaaaatatctaatatatatctaatatattatatattttatataatatatataataaatatataataataatatatatcagatattttgatacagaattttgctcttgttgcccaaacgagtgcaatggtacaatcttggcctcccaggttcaagcgattctcctgccttatcttcccaagtagctgggattacaggcatgtgcccacacctggctaattttttgtatttactagagacggggtttcaccatgttggtcatggtggtctcgaactcctaatctcaggtgatttacccgcctcggcctcccaaagtgctgggattgcaggcatgagccatcgcgcctggcctaaattattatattgatgaggagtaactgtgaatctcctcagttgtgcaaattctactatattttggttgggaaattttactgcttgttgttacttttagattaaaaaaataaatataccatgatacaaactcccctcttgagttgtttacaaagagttgtttattaaagctgtatgtttgagactacgctagacaggtgtcctctccatctgaaataatgagaaccatttgtctactcttttgaggggaaaagtatggatttataggtagtaaatagtccacactttacatgataaaatgtgaattccctatttctgttgctttgcctgtttcttttattctcatatgcattcaattttataagtacccttctatcatgctatttatatattcctaatatcctgagctactttgaggaagtcctagaaattgagaaatagtttttgtcattctataaatctaaagttaacaatggtcacattttaaaaaatcaagttttgtgatataaactatttatatatctctttatatatcaagtctttatgtatattttgtgcagcttgtcttttttataggaacctcttgttttggggattgtttttggttaagaaattgaaccctttgtttgcccaaaataactgcaatagaaagtcagtgataagaactactaaatagatccaggttaattattttaagatagaatttcacatggaagaaaaggctttgtgtcacaatcatctgtgaggcattttactgtatatcagaattttggagtaaggtgaagatgatcatgtcatttgaaaagtcttattggtgactctatttttctcctttgaaggaggggtttaatcacttcaaatggataacattaaggttaaattaagggcgaagttgatatttggccctgacttttatatgaaggtaacatttttgcaagtaaattgtagacgtaattaaaaaaacccagctaaaacaaaggtggtattgagaaagaggaagagcaagtggtctatattgtcagaaaaataagattcatattggagagtaattgaaaataacctgcaaaaagttgattacctaacatgtgattacatattaggttactagaagtttctcaagtgtcttgcaatttctaggtttagtaaaattcaatgaaagctgtactcataaagataaatatgatagcatgtgaaagacagatggacttaggtggatgtggaataaggcaagccagggaaaaggagtaatttaaaaagtaatataggtgacatgggaaatgctcatgtcattaaaaatatgaatttaaaaatttgaatttggggattattaataattgctcatgccttgctatttaacaaactattttctaggagtcagcatgtataggtgaaagtgacaattagaaacatagaaagaagggatgcagatatggatttgtaaatacctcaataaaagtcttattcaaaacttggaagtgagtgagaacaattaaaggaaaggatatgggacagggttgaagttgagagagaaaaacgagatcatttaggaacagctgaagaatcaaaaacagcaaagcacaatgggtagaaattccactagaatttgaagtggtgaagtatatgaaaagaaaatattttaagcaagaatcctaatataagctgcagataaattaaatgtgataaagaatatgctctagaattttatcttccatcattacacagaagaaccttaagagcatctgatatttattgaacaaagaaagcatggacttcaataatctataaggctttaaaaattcaaccaaaatttgataattttaagttacattttttccctagagcactatataatagcatgtcctaggaaagacagatgtgggcaagtttcttttctaccaagagtgtagaatagtttacatttctgatttaaaaagcagttccgttaacacttaaatttgctgaactggttgatattaatgttgcaaatattggtagaaaagttgtttagctgtgaataattagatcccttactttaaattaataaaagaagtcgggataacactgaccgtgcaaattacaaacgtgaggagggtttactataaaagtagagaaaagaagatactgttttaaaaatatatggtatagcactgttacgtgaattgatttcttaccttttggagccgcatgatgtcgctgtctaccatgaagttatagctagccaacattcaaatttcttctattactgcatcattccctgactgttgaatgatggcggacgcagaagaaatggattaataaattccggaacatacagtattttatctttatgcggaagatcttctaatggaaataaaaccagaggtatttgacatggtgtttaccccggaggatagattgggaaagcaatgtctgctcctcccgcttctgctcctcgcagcctggaaggtggggagcggccagctccactactccgtacccgaggaggccaaacacggcaccttcgtgggccggatcgcgcaggacctggggctggagctggcggagctggtgccgcgcctgttcaggatggcctccaaagaccgcgaggaccttctggaggtaaatctgcagaatggcattttgtttgtgaattctcggatcgaccgcgaggagctgtgcgggcggagcgcggagtgcagcatccacctggaggtgatcgtggacaggccgctgcaggttttccatgtggacgtggaggtgagggacattaacgacaacccgcccttgttcccggtagaggaacaaagagtgctgatttacgaatctaggctgccagattctgtgtttccactggagggcgcgtccgatgcagatgttggctcaaattccatcttaacctataaactcagttctagcgaatacttcgggctagatgtgaaaataaacagtgatgacaataaacaaattgggctcttattaaagaaatccttggacagagaggaagctcctgcacacaacttattcctgacagccacagatgggggcaaacctgagctcacaggcactgttcagctgctggtcacagtgctggatgtgaatgataatgctcccactttcgaacagtctgaatacgaagtaagaatattcgaaaatgcagacaacggaacaacagttatcagactgaatgcttctgatcgggatgaaggagcgaatggggcaatttcatattcttttaatagccttgttgcagccatggttattgaccactttagcatagatcgaaatacgggagaaatagtgattcggggtaatttggattttgaacaagaaaacttatacaaaatcctcattgacgccacggacaaaggccatcctcccatggcgggtcattgcaccgttttagtgagaattttggataaaaatgataacgtccctgagatagcactgacttccttatccttgcctgtacgtgaagacgctcaatttggtactgtcatcgccctaattagcgtgaacgacctcgattcaggtgccaacgggcaggtgaactgctcgctgacgcctcacgtccctttcaagctggtgtccaccttcaagaattactactcgttggtgctggacagtgccctggaccgcgagagcgtgtcggcctatgagttggtggtaaccgcgcgggacgggggctcgccttcgctgtgggccaccgccagcttgtctgtggaggtggccgacatgaatgacaatgctccggcgttcgcgcagcccgagtacacagtgttcgtgaaggagaacaacccgccgggctgccacatcttcacggtgtctgcgcgagacgcggacgcgcaggagaacgcgctggtgtcctactcgctggtggagcggcgggtgggcgagcgcgcgttgtcgagctacatttcggtgcacgcggagagcggcaaggtgtacgcgctgcagccgctggaccacgaggagctagagctgctgcagtttcaggtgagcgcgcgcgacgcgggcgtgccgcctctgggcagcaacgtgacgctgcaggtgttcgtgctggacgagaacgacaacgcgccggcgctgctggcgcctcgggtgggtggtactggtggtgcagtgagcgagctggtgccgcggtcactgggtgcaggccaagtggtggcgaaggtgcgcgcagttgacgccgactcaggctacaacgcgtggctttcgtatgagctgcagcccccggcaagcagcgctcgcttcccgtttcgcgtggggctgtacacgggcgagatcagcaccactcgtgtcctggacgaagcggactctccgcgccaccggctgctggtgctggtgaaagaccacggtgagccggcgctgacagcgacggccacggttctggtgtcgctggtggagagtggccaggctccaaaggcgtcatcacgggcgtcggtgggcgccgcgggcccagaggcggcgctggtggatgtcaacgtgtacctgatcatcgccatctgcgcggtatccagcctgctggtcctcacgctactgctgtacacagcgctgcggtgctcggcgccacccaccgagggcgcgtgcacggcggacaagcccacgctggtgtgctccagcgcagtggggagctggtcgtactcgcagcagaggcggcagagggtgtgctccggggagggcccacccaagatggatctcatggcctttagccccagcctttcaccttgtcctattatgatgggtaaggcggagaatcaggatttaaatgaagatcatgatgccaaagtaagtgaattttcataattaacagttaatttttattttaaatttataattgttttcctcatatttgtcttctatatttctgtttttaatttttaattaattttacaaaattacatattttcattttattgtgtttcttattttaatctctttgcttctttaatattcataatttaagtgaaattagaaatcactgtccacaatctgcacctcagaatttttgtcttcaaaccaaaatattcttggatatgtcgttttctgttgcattttaattcagaatcatagtagcatttttttctgattaattatatgggattttcatttgtttgcctttgagctttaggataatttttttacatatactcttttttgatcatatattgaaatttgagcaccagtgtatcacttatgtttttacactttccatttcaatgtttttctgtcgacacttttattaagctaacgctttgattttatccattttgtgtaagaactctgatcatcatagtttttatctgtggttcccttttcagacttgtgattccgggaggcaatagtgttcatttattgtcccccttttaaaccattgaggaataaaggacaaaaacaatagttatcagcctgaatacttctggttgttatggttattgatttatttactaccgatctaaataatggaaaaatagtgattcaacagaatttagaccttgtgatcaagtaaatttatatgaaaactgcattcctctggcattgcggctctcttatttctgtttgaatttcacttgatggtcttctcttcatggagtctaaatctatttctttgtattagtgttttcattgtttctacacagtaatttaaactattcactattttgtatgtgtgtgtgtgtgtgtgacagggtcttgctctgtcacccatgctggagtacagtggtgcaataatggctcactgcaccctcgaatgcctgggctcaagtgattctctcacctcagcctctggagttactacacacgagcaccaccatgccccccaccttttttttttttttttttttttttaagagatggggtttctccatgttgcccaggctggtctcaaactactgggtgcaagtgatctgcccaccttggcctcccaaagtactaagattataggtgtgagccactatgcttggctagtcattatttctttgaatgaaaagcagcaaaaagtagtgattaagtgtgagttttggtgttatcctcccttgcctaaatttcatcgctaccaattttgttttgtggatggattgtttcacctctatttcagtttcttctgtaaagttggaatgataaacactagtttcaatgatagaattgtcataaagctttagtaagttgatattgtaaggcgcttataactgtgtttgccaaatagcaagtgcttaaaaaatttgctactagttttccgaagaggaaaagaaaaactttatgtcattttatgctaggaaactctcattacggattccatattgttttcattttacgtaaagattgaatttttgttattcatagtgaggccataattaccaatttaatctgagatgtctctaacattttaaatgccatgttctacattaaaagcaatttaaaatgtgtgtttcaaagttgaaaattgaattaagacttggacagtggaaaagttttatgaattcaaaagacatttaacctgctgagtcctcagtgatttcctggagttggttttgactttttgtgttgtccatgttcccaggaaatattagactacattaagcatgaatggtgtatttgcccacatttaaaagttgcttaagggccattagaggactgagttgtggtttgtgtttcctaatgtgagcattttccattcttgaaatggcagaaactggtagtggtattttctgttttctaaaagaagtacatgataatttttaagcgtgtaattaatattgcactaaaatttaaaaaaactaactctacatacttaagagtggcagaattgtctctgattatactgaagatcaccatttgtgtagctaatgatatctaacagcctcaaaacagcatactttcttaggaagtagagaactatagcgttgctagtgagtaaatgttttttaaaaagttcctaggagggtctttaagagtatcacactgtgcctgctgagaatcatcgaattaacaagacctggcttcaaatttaatagataaataaaggtaagtatcctacataaatacgatgatagtaaaagcaagaatattgtaagaggtgctagaaaggtacatcatagtgttattggaattggaaaaaaatctttgcctttttcccttgttgaaggagaccgtgaagagtcatgatgttttactggttataaaatggaaagagttttccctgggagaatatggagactaacaggtattcatgagaagagagtaacttaagtgagtatacagaaaattccaaatgtacctagaaatgaggaatagtccactttgggtaaagcacatggttcccataagagagagtgtgatataaagcaagaaaagtaatatgagaaaaaccttttgtataactttgagtactagacgagtaattttgacactcttcaaagtcatttgaaagctgtcaaaaagtgtgaagcaatacgaataaaaagtattaacggaagatgactgcaaggattaaatgaaggagaatgaaataggaatggacaggttacacaataagaagctactgcaatacaccaggagagcagcaattataaaaacttatttaggaaagcatctgaatacagacataattattttacatgccattgggaacattggagtgaaacattccagaaaacgaacacagtaaggtagatccaaaaaggatgaaatacctcaagacttgatcaaagggctgctgtatgtgagatggctgagcactgaaatttatctaataaaataaacttacattttaaaagaaataatacaaatcatatttgagattgtaaaaataggcatatattcataacacacaagtgttcgaaaggatagaatgaggaaacaaatataaaatgatgaactcctgaaacagtatatatagattctgctaaagcaaaaaattcagaatacttcctcctcaaaaagttcacatgatacaaattcttccccttcaaagattccccaaaccttctcttattttgttttcccaagagaagtgtctggatagttgctaatgtttcttgcctcctaaaaagaaaacacacacacacacaccgctttctaagtttctctttcatcaatcagtagattcttgagatcctgggtccctaaaagagtacaggatttttcttaacaagcgatactgaatcaagaatatgaagtttcctgggatctagatcaaaggaatttaaacttgcagttgtttaaattcatgttgtcacttaggtttctatctttatttaaaactgtgtgaaaaaaaagtttttctaaggcatgaggaagctacagttctggtaacactgagtattcaaaagccatcagtcgcctaagaatgcttctaacaatcatgagaaatgctattttaacctttaacaacaatgaagaaaaaaattcagagtttgaaataaaacttttcatctgattaatagtttgtaatggtttgtaattcttacttacatgatggccacatgatgtcgctctttaccgcaaattctttcgtaatcagcaaaaggaagtcattccttttcgcactggaaagacgctccactctctttcactctttggatgcacaacaatggccacacatcgagattgaaatgaagggataaaaacattcctataaattcgaaggcaagttttgctgactagaaaaacaagccaataatttgaaatggtgtgcccgaatggatacgacccagggggccgacatctactgctgtttattataattctagcagcttgggaggcagggagaggccagctccactactcggtccccgaggaggctaaacatggcaacttcgtgggccgcatcgcgcaggacctggggctggagctggcggagctggtgccgcgcctgttccgggcggtgtgcaaattccgtggggatcttctggaggtaaatctgcagaatggcattttgtttgtgaattctcggatcgaccgcgaggagctgtgcgggcggagcgcggagtgcagcatccacctggaggtgatcgtggaaaggccgctgcaggttttccatgtggacgtggaggtgaaggacattaacgacaaccctccggtgttcccagcgacacaaaggaatctgttcatcgcggaatccaggccgcttgactctcggtttccactagagggcgcgtccgatgcagatatcggggagaacgccctgctcacttacagactgagccccaatgagtatttcttcctggacgtgccaaccagcaaccagcaggtaaaacctcttggacttgtattacggaaacttttagacagagaagaaactccggagcttcatttattgctcacggccaccgatggaggcaaacccgagctgactggcaccgttcaattactcatcacggtactggacaacaatgacaatgccccagtgttcgacagaaccctgtatacggtgaaattaccagaaaacgtttctatcggaacgctggtgattcaccccaatgcctcagatttagacgaaggcttgaatggggatattatttactccttctccagtgatgtttctccagatataaaatccaagttccacatggaccccttaagtggggcaatcacagtgataggacatatggattttgaagaaagtagagcacacaagatcccagtcgaggctgtcgataaaggcttcccacccctggctggtcattgtacagttcttgtggaagttgtggatgtaaatgacaatgctccacagttgactctcacttccctgtctctccctattccagaggacgcccaaccaggtaccgtcatcacattgattagcgtgtttgaccgagattttggagtcaacggacaggttacctgctccctgacgccccgcgttcccttcaagttggtgtccaccttcaagaattactattcattggtgctggacagcgctctggaccgcgagagtgtgtccgcctatgagctggtggttaccgcgcgggacgggggctcgccttctctgtgggccactgctagcgtgtccgtggaggtggccgacgtgaacgacaacgccccggcgttcgcgcagcccgagtatacggtgttcgtgaaggagaacaacccgccgggctgccacatcttcactgtgtcggcgggggacgcggacgcgcagaagaacgcgctggtgtcctactcgctggtggagctgcgggtgggcgagcgcgcgctgtcgagctacgtgtcagtgcacgcggagagcggcaaggtgtacgcgctgcagccgttggaccacgaggagctggagctgttgcagttccaggtgagcgcgcgcgatgcgggcgtgccgcctctgggcagcaacgtgacgctgcaggtgttcgtgctggacgagaacgacaacgcgccggcactgctggcgcctcgggtgggtggcactggtggcgcagtgagagagcttgtgccgcggtctgtgggcgcgggccatgtggtggcgaaggtacgtgcagttgacgctgactcaggctacaacgcgtggctttcgtatgagttgcaaccggtggcggccggtgcgagcatcccgttccgcgtggggctgtacactggtgagatcagcacgacacgagccctagatgagacggacgcaccgcgccaccgccttctggtgcttgtgaaggaccacggggagccctcgctgacagccacagccaccgtgctggtgtcgctggtggaaagcggccaggcaccaaaggcgtcgtcgcgggcatcgttgggcattgcaggcccagagaccgagctggtggatgtcaacgtgtacctgatcatcgccatctgcgcggtgtccagtctgttggtgcttaccctgctgctgtacacggcgttgcggtgctcagcgccgtcctctgagggcgcatgtagtttggtaaagcccactctggtgtgctccagcgcggtggggagctggtcattctcccagcagaggcggcagagggtgtgctctggggagggcccacccaagacagacctcatggccttcagtcccagccttcctcagggtccatcctctacagacaatgtgagtcataaataatcttgtttccaacaattttaaaacaattagttcaattggtctccttaaattttctttcataatttcttttttagttgatagctttatgtataattattattttttaatgttatgctgtatttgcactaattatttggaagtacgtttaatatacacttttgttttgggatgcgtaatactatagatcaaaatctatggtttatgttggctactctccatttttggaggaggactttgctaactggagcaatggattcacctttcttctatagtgtatttacaaaatcaaatatttacatttccatattttgataatcaatacctataaatgttatagtaaacaaatttaatatatatgttacctaatattttattctatgtattgtcctcattttataaaatatagctgtgtcaaaatcatctgttcaattttgcctttttatctttagtctagaacttgaattttaagcatttcttttacatctatttatcttctttttatcatatttgtgtagcactgacttctttttaacttactttgttgagatgtatttgccatgttcatgaagaattaatatgaacaatttaaaatagtttaaatggcagtttaatagtattttttattttgttccttgtttgtataagaaatatattcacattcaaaatttcaaagagtgaaatctagtacgtagtaaaaaatctccttgcctcctcaaaccccaaaccatttactttacctttctgaatttctgaagcagtttactttttttgtatattcccaagattattattgccaaattatataaatatatttacaatcaccaaattgtaaatcgccaatatatatattttataatttgccccttccttccttccttcctttctttctttctttcttcctttttctttcattctttttcttttttctttcttctttcaagacacgctctcactccatcacccaggctgctgaaatgcagtggtgggattatagcccactgcaacctgaaagtcctgggctcacaggatcctcccatctcagcctctggagtagctgggaatacagtttgcatgtcattgtgcctggctaattttattttatttttgtagagacagggtggagtcttgtttcccaggctggtcttgaactcctggcttcaagcgatcctcctaccttggcctcccaaagtattgggattacagacacgaacaaccacacccagcctgcctttcatctttccttttttttaaaaaaagaagtgattacagtagaaacctacctttctgcactttttggttttccactttaagttatatatatatagtgtgtgtgtgtgtgtgtgtgtgtgtgtgtgtgtgtgtgtgtgtgtgtgtgtgtttgacagagttttactctgtcgccctctctggagtgcagtggtgcaatctcagctcactgcaaaatccgcctctctggtacaagcagttctcatgcctcagtctcccaagtagctgggattaaagacgccaacaaccaagccatgctaatttttttttttttttgtatttttagtagaaacagagtttcaccatgttgccccggctggtctcgaaatctgggactcaagtgatctgactgcctcagcctcccaatgtgctgggattacaggagtgagccaccgcatccggcctaaattatatattgggttttgtggcatattatttcattagcgcttattccttgtttttgattatttgctttcttatttttaaaagtatttgcatcttattttcttttatggatatatcatgatttattcatccagtactgtattagggacattaatgaaacaataaccgaattgtctagacttttaaaaattttttacaaataatttggttggtcaaaaaaatgatagttaacggggcatggtggcacacacctttaaccccaacatttcgggaggccgaggcaggaggattgcttcagtctagtagtttgagaccagcttgtgcatcttttgtagagactttgtaaaattagctatgcatggtgatgcatgtctgtagtttcagctactcaagaaactgaggtgggaggatcacttaagccagggaggtccaagctgcagttatcatgccactgaactccagcctaggtgacagagcaataccttgcctcaaaaataaaataaaatgaaataataaaataaaataaaataaaaacccagaactgacaattttcactgttcctaatattctaatatactttagtaaattattttaggatatgttactgttttcttttcaacgtgaataaggatagaggtatgcaaagtcaaaaacctgtctgataatcaatagaattatttaccattaagccataatatgtcattcacataagcagaccaagtttgctgctcttgttgaaagatattcagttttgtggaaaaatctataaatatctttgaccttcaaagatgtaactgtaatctgtttttattgctttgcttttatgcttacatgcatgtatatttaaaaccttcctagcatattattaaagttttaaatatcctatttatattgggaaatacctgaagttgataggggatcctccttagccacctaagctgtattcatcaattattatgatgatgatgatgattattatttttgagacagggtctcactctgtagcccagactgcagtgcagtggcacaatctgggcttactgcaatctctgcctcctgggctcaagtgatcttcctacctcagcctctcaagttgctgggactataggcacacaccaccatgcccaactaatttttgtattttttgtagagatggggtcttaccatgttgcccaggctggtctcaaactcctgagatatcgagaaatactattttctttacaaattgtttgctactatttagagtcaactacagagatttttttgggtaaataatgtgatgacaaatttaaatcatttcacagaaaatacccttatttgcctttcctatttaacctacgtttttggtaagaattttgtagaaatttggaggagctcttaattgcctactatgaaggcattcatgatgaatccatggagaatttacttttgaggtggactttgaaagatgaatagaattttgacagaaaaagatgaagtaatagaagaaaaaccttgaacaaagagtgtgccaagaaggagacaacatattttctgtaaaatatgactcctattggaaagtggttagccttagcactgagaagattggctcatggtcacgtagcgtatctcccagatggaagtctaatgtcttgacaattagtcaatagaaagataaacttgttgaagattttagtgaaatcgagtgaaagctgtactaataaggacagaaattatcacacgtgaaaggagagatgggatgtatacaaattttaaatatggtaggcaaaggaaaagaagtcataaaaatacatatgagtaaatgtggagaatcactatgctataaaaattgtgattttttaatgatttgggttttgggtgattattgattagatattcttttaactttggtcgactcattttctaggcaatgttagggtatacaggtaaaaatgtcaggtagaaaatgaaaatagggggttgcagatatggagttaagaatacttcaaataataggctagtttaaagccgtggaaatagaaacgttaaataaaaagttggggaaaaaagtttaaaggcataattctggtaaatactcactttttggagcagaagaaagatgaagaactaacaagccaatgatggcaatactgctagagtttggcatgtcagagaaatcataaaggaaaatgttttaagtgagaggctgaatttaacaagctatagagatatagagaaatagtgtaaagaatatgcacatacatttttattactttagtaaataaaacggttcaggcaatttgacatttattgaataaagaaaagcaaaaatttaacaataagaacacaagaagataaaatgtagaaaagttagaattatatgctcacctcagagtaatatataccagtgtttctggtgaccaaataaatattaatgcatttcttccacacgaaactatggaggacagtttacatttctgatatccatgacatacaggtcatacttaaatttattattaattgatacgatatttgaaatattgggaagaaattcctttccttatgaagaagaaatccctagctgaaactaatgtaaggagccagacagtatgaatgcctctgcaattgataaagttaaggatttactattaaattatgataaagaaatagaaagtgcatagaagaacccagatattgcggaagtaattcatgtaatcattaccttttgaagccacatgatgtcgctgtctaccaagaagttctggttggtcaatgttcaaagtcttttctctgacagcatctgtctctaaaggccgaacaacgggagatgcagcggaattggattaaaagactctgaaagtacagtcgttcatctttatattaagataatattttctgataggaaacgactatttaacatggattatcactggcgaggagagctgggatcctggcgactactactcttgcttctgctcctcgcagcctggaaggtggggagcggccagctccactactccgtccccgaggaggccaaacacggcaccttcgtgggccggatcgcgcaggacctggggctggagctggcggagctggtgccgcgcctgttccgggtggcgtccaaaagacaccgggaccttctggaggtaagtctgcagaatggcattttgtttgtgaattctcggatcgaccgcgaggagctgtgcgggcggagcgcggagtgcagcatccacctggaggtgatcgtggacaggccgctgcaggttttccatgtggacgtggaggtgaaggatgttaatgacaacccgccagtgttccgggtaaaagaccaaaagctgtttgtttcagaatccagaatgccagactctcggtttccgctagagggcgcgtccgatgcagatgttggagctaactccgtgttaacctacaggcttagctctcatgattacttcatgctagatgtgaattcaaagaacgatgagaataaactggttgagctcgtattaagaaaatccttggacagagaggacgctcctgcgcaccacttattcctgacagccacagatgggggcaaacctgagctcacaggcactgttcagctgctggtcacagtgctggatgtgaatgataatgctcccactttcgaacagtctgaatacgaagtaagaatattcgaaaacgcagacaacggaacaacagttatcaaactgaatgcttctgatccggatgaaggagccaatggggcaatttcatattcttttaatagccttgttgaaactatggttattgaccactttagcatagatcgaaatacgggagaaatagtgattcggggtaatttggattttgaacaagaaaacttatacaaaatcctcattgacgccacggacaaaggccatcctcccatggcgggtcattgcaccgttttagtgagaattttggataaaaatgataacgtccctgagatagcactgacttccttatccttgcctgtacgtgaagacgctcaatttggtactgtcatcgccctaattagcgtgaacgacctcgattcaggtgccaacgggcaggtgacctgctccctgatgccccatgtccccttcaagctggtgtccaccttcaagaattactactcgttggtgctggacagcgccctggaccgcgagagagtgtcggcctatgagttggtggtaaccgcgcgggacgggggctcgccttcgctgtgggccaccgccagcttgtctgtggaggtggccgacgtgaacgacaatgctccggcgttcgcgcagcccgagtacacggtgttcgtgaaggagaacaacccgccgggctgccacatcttcacggtgtctgcgcgagacgcggacgcgcaggagaacgcgctggtgtcctactcgcttgtggagcggcgggtgggcgagcgctcgctgtcgagctacatttcggtgcacacggagagcggcaaggtgtacgcgctgcagccgctggaccacgaggagctagagctgctgcagttccaggtgagcgcgcgcgacgcgggcgtgccgcctctgggcagcaacgtgacgctgcaggtgttcgtgctggacgagaatgacaacgcgccggcactgctggagcctcgggtgggtggcactggtggcgcagcgagcaagctggtgccgcggtctgtgggcgcgggccacgtggtagcgaaggtgcgcgcagtggacgccgactcgggctacaacgcgtggctttcgtatgagctgcagccagctgcaagcagccctcgcatcccgttccgcgtggggctgtacacgggcgagatcagcaccactcgtgtcctggacgaagcggactctccgcgccaccgtctgctggtcctggtgaaggatcatggtgaacctgcgctgaccgccacggccacggttctggtgtcgctggtggagagcggccaggctccaaaagcgtcatcgaggcagtcggctggcgttttgggtccggaagcggcgctggtggatgtcaacgtgtacctgatcatcgccatctgcgcggtatccagcctgctggtgctcacgctgctgctgtacactgcgctgcggtgctcagcactgcccactgagggcgggtgccgggcgggcaagcccactctggtgtgctccagtgcggtggggagctggtcatactcgcaacaacagccgcagagggtgtgctctggtgaggggccaccgaagacggacctcatggccttcagcccctgccttcctcctgatctgggatcagttgatgtaggcgaagagcaagatttaaatgttgatcatggcctcaaagtaagtccatttaaatttagaactcataaattctatttgtggaaattgtagttactttaaaagtgtttcagatttagtttttcaccgtattttatagtgaaaatttaaacattgtttagtttttagaaaccttttataattaattgaattttctcagtggcataatacagtattaatcattctccacaagttgggtctatcttgaaactcaagttatggttggatgatatccattttttactgaatatttattttggcctgccttacagccgtcttctctgaacaatactctaaggacgttcagggcattttgatctttggtgaaagtattcccccaaagcgtttattcttttgtccttaggcactgaactcttaatcttactccatatgctgtactttgaaatgcatgttttaaatatgttgtctttatatttacttttattcactttaagatctcggtttattcatcttatctgactttttagtgtctggtagtcacaaatatctttggtgtttcactattgccgttttaagcagtgtagtgataaaatacagaatgatagtgtttttcaaaatttgatagttttcatattcttcctaattttattataaactagttaaaaagtaaaatcaagagggaagagatttgtaatccttcttttaattcattatttagaccattttaccatttggagacatgttttttattctacatgatttttacagttgtattgtcgccaacttaacattttttgagcctctatgtttaggaaatgattactttattcttgcaagtatcttctaaactctaatcattcaaccctttgttcatgagttggaatattttcaataatattccacattaaagtgatatttaatatatgacttagaaaaatgttttcatcagaaaaactatacatgataatttcattcttgcaaaccaaacatataatttataaatccttattatacagaatatttgggattatcatggcccattagttcgtgtaaaaatatttagtattatgggataaatctttgaaaaatccaagatactttattttggtatctttcaacattttctttcttttatttcttcttgtctttttacacgtttgcttcttgtgactgttggacctgcctggatattaaatacccattagacttcgtgcatattgctttggagagaatggtagaaattgatggaagggaatgaacgatttctgggactctgaattcttacagtttgttattagtattgttttaaatcttttaatcacttatgaacaaataatgtaatcatttatgggcatattttagcccccttgtccaactgaaggtaacctcaaagcagcattgttttgtagtttattttacagttctcttaatgcctgtccatgtttagcattttatttgactatttgaacacattgtgtaaaagcgaattgttttcattttagtcctttaaaaaatatgattgttttcatttaagtccttttaaaaaatatgattatctttattatcctgtttgaataatatgtgttttcctttgtgaaagtaatatttcctatcctgtctatgtctacctggttctcaggtattactttaattactgaattctcctaaacatttaattgacttttacaaaatatcataaataggaggattctttccaccacctagcattgtatttggcaatttatcatttaagtcattttagttctgtttttcttcaactctctgatatttgaatttggggttgtgctttcacagtgagaaagtctaaacctatttcttgtacattaatacttttcactattctaattatggtgatgcttttagctattaagaatttctgggattgaaatgtgtcagaagttagttattaagtattgtggattctgaagctctctaaatcaagtcctccctttaccaatttttgtatgtgtagccattggtaaaggatttgttattcagttccttggcattatatgtatgcatgataaatgtgaattctactttatagatttatttgtatcaagtaagttaatagttataaattattaataataaactctggcaagtgataggtacataataaaatttagttattaccattcttaagagaaaagaagttagtgattgcagaaaggcaacctaaaatgtcagaaagtcgttatggccttccatattaatcttatttttgtgtaaaactatcttctgtaaagtcattttttagattaacctaggatgtttcaatattttgaatgttgtgtggtggaatgaaaaaaatctaaaagttattacgagtttaggaaagtcaagttaacaccacctatgtgggaaaacagttttttggaaaggttaaagtccttccaaggaatgtgtagactatcttactttgatagttgtatgtttcccatatttaaaagttgcctgagatcctgcagaggcctgagtaggcgtttgagttctttgtatgtatgagatctttccattaatagtatttttcttaaaaagaagtatacaataatgttttgatgatgatttaaagtcaatttatgttgtagttctatgaattaagtaaaccatttatgtagagtgttgtaaatagccttttaaagtgctttctcttttttcttttcttttctttctttctttttttttttttttttttgagacggagtctcgctctatctcccaggctggaatgcagtggcgcaatctcggctcactgcaacctctgcctcccgggttcaaatgattctccttcctcagcctcccaagtagctgggattacaggtgcatgccaccatgccctgctaattttttgtatttttagtagagtcggggtttcaccatgttagccaggatggtctcgatctcctgacctcctgatccgcccacttcggcctcctaaagtgctgggattacaggcatgagccaccgcgcccagcctaaaatgctttcttagcaagtagagaagattgtaataaccagtcttcattaaacattaaataggacccttacagatctctaacagcatatcatcatgtcaggaattattactgagccccagcccctggctttaaaatttgaggtcaaataaagaatatgagtcacacaatgcaaggcaagataatgtaacaggtacaagaggtaaatcagaatgacgttgaagttgaaagacaatcatttcctatttgaatttttgaagaaatacttgaaggggcatggtgtgtttcagtggttttaaaataagtaagttccccccgggagaatattgagaatgatagacatttcttggaaagagaaaacataaggaaagttgaagacacagaaagcatcaatatgacaagtagaaaagtccactttggttaaaacacacagtctgcagagaatgaaagcaggaaaaccaatgtaagaagatctcttgatttctgagtaataaactaaagggccatgagtgattaaggaatttggccactctttagaattaattgggagctatttaactaccttgagcaaaataaatcacgacttttgaaagaaggttgaacgggaagacaaactcagaagctcctgcagtaatcaaggacagaagcaattgttaaatgcacctcttaggctgttatcagtagaaatacgaaataaaagataaatatgcaaaaacattaatggcacaataaacactcacggttttgcctttagacttgagatacactaaaatctagatttaattaatcgacttggacgttggaataagatagtaaaactcacaacaaaactttgtagaacttagtcaggaaaagaatctcaagcatagctttaaaaacagaaattgccccgagtactaaggatgagcaataatgaaattaaaacatattgtaataacattacacaaactatattggagactacaaagaagagattattcatagattataaagcttggaaagaatcaaaacaacacatttctggaaacagattgtataaatgctacaaaagagaaaaatatattttctccccacgcaacacaagaccttaaagtcaattctcgcttttcttgcaatattttataccttttcaattcatagaattactcaagaaaactacctcagttggttgctactttttgttgattccttttaccagacatgactaagtttctttttcatcagtagatttctgggctcctatattcactagagattgcaactcctggatttctcttacactagaatcctatttcgagccatatgggagattctgaattccagaacaaaagaattttgtaatttaaaattcgtgattgctcaatggaatcattttaattgttacttcatttctgtcgttatttaaaacttaagtggagagttttctcagggataagaaaaccacaatcaaggtcatacaaaacttttagaggcagtcagtctgctaagaaggctccagcaagagaaacgggatcttctgtttcaacaatcattacttaagaaaaaattaagaaaatgaaataagttttgcagaataactgtgaaatttttattcatgaaatatgtacttacactttgggccacgtgatgtcactctttgccgcgatgttctctctgaatccagacaaatacagcccttttcccatgggaaagaggctcaattctttttcactctctctgtgctgaacgatggcgaacacagcagaatgggactgacgaaatcagatgatttcttctaatttggaggcaattttcactaattagaagaagactgagtatttgaaatgttatactcaagtcgaggagatccagagggtcagcctctactgctctcgcttctgatcctcgcaatgtgggtggtggggagcggccagctccactactccgtcccggaggaagccgaacacggcaccttcgtgggccgcatcgcgcaggacctggggctggagctggcggagctggtgccgcgcctgttccagttggattccaaaggccgcggggaccttctggaggtaaatctgcagaatggcattttgtttgtgaattctcggatcgaccgcgaggagctgtgcgggcggagcgcggagtgcagcatccacctggaggtgatcgtagacaggccgctgcaggttttccatgtggacgtggaggtgaaggacattaacgacaaccctccagtgttcccagcgacacaaaagaatctgttcatcgcggaatccaggccgcttgactctcggtttccactagagggcgcgtccgatgcagatatcggggagaacgccctgctcacttacagactgagccccaatgagtatttcttcctggacgtgccaaccagcaaccagcaggtaaaacctcttggacttgtattacggaaacttttagacagagaagaaactccggagcttcatttattgctcacggccaccgatggaggcaaacccgagctgactggcaccgttcaattactcatcacggtactggacaacaatgacaatgccccagtgttcgacagaaccctgtatacggtgaaattaccagaaaacgtttctatcggaacgctggtgattcaccccaatgcctcagatttagacgaaggcttgaatggggatattatttactccttctccagtgatgtttctccagatataaaatccaagttccacatggaccccttaagtggggcaatcacagtgataggacatatggattttgaagaaagtagagcacacaagatcccagtcgaggctgtcgataaaggcttcccacccctggctggtcattgtacacttcttgtggaagttgtggatgtaaatgacaatgctccacagttgactatcaaaacgctctcggttcctgtaaaagaggacgcacaactggggacagttattgccctgattagtgtgatcgacctagacgcagatgccaacgggcaggttacctgctccctgacgccccacgtccccttcaagctggtgtccacctacaagaattactactcgttggtgctggacagagctctggaccgcgagagtgtgtccgcctacgagctggtggttaccgcgcgggacgggggctcgccttcactgtgggccacggccagggtgtctgtggaggtggccgacgtgaacgacaacgcaccagcgttcgcgcagtccgagtacacggtgttcgtgaaggagaacaacccgccgggctgccacatcttcacggtgtctgcgcgggacgctgacgcgcaggagaacgccctggtgtcctactcgctggtggagcggcggttgggcgagcgctcgctgtcgagctacgtgtcagtgcacgcggagagcggcaaggtgtacgcgctgcagccgttggaccacgaggagctggagctgctacagttccaggtgagcgcgcgcgacgcgggcgtgccgcctctgggcagcaacgtgacgctgcaggtgttcgtgctggacgagaacgacaatgcgccggcgctgctgacacctcggatgaggggcactgacggcgcagtgagcgagatggtgctgcggtcggtgggcgccggcgtagtggtggggaaggtgcgcgcagtggacgccgactcgggctacaacgcgtggctttcatacgagctgcagccagaaacggccagcgcgagcatcccgttccgcgtggggctgtacacgggcgagatcagcacaacgcgtgccctggacgaaacggacgcaccgcgccagcgcctactggtgctggtgaaagaccacggggagccagcgctgacggccacggccactgtgctggtgtcgctggtggagagcggccaggcgccaaagtcatcgtcgcgggcgtcagtgggtgccacgggccccgaggtgacgctggtggatgtcaacgtgtacctgatcatcgccatctgcgcggtgtctagcctgttggttctcacgctgctgctgtacactgtgctgcggtgctcggcgatgcccaccgagggcgagtgcgcgcctggcaagccgacgctggtgtgttctagcgcggtggggagttggtcgtactcgcagcagaggaggcagagggtgtgctctggcgagggtaagcagaagaccgacctcatggccttcagcccgggcctttctccttgtgctggatctacagagcgaacgggagaaccctctgcttcctcagattcaactgggaaggtgggtttttctagcattttatttatttatataattttttttcttgaaagatattatcgattactcccaggggccgttcaaatagttttattcatttttctagaaatccagcagattttttttctgataaagtaaaccccttaacattggagccgactttgtcttgacttctagtgagaattataaactgtatattaaatagatattttttgggtgctgaatcaattttatttaaatttgtgattaaagtgacattgaatttctgatgctatgctgccataacacttgaaaaccaatttagttgttagtcattcattaaacattaacatcactatcatttatttattgctaaatgatgcatagtattttagtctacttgtattgtttataagaaacccaagcaaaaatatatagcaattgttaccttgttaagtttgtagttctctacatttctctggatggagactgtgaacatctgattgttcagcaaccttcagtatctattattttaataagaaagaaacttcccctaaactttagaaaacagttgctccactttaggaatcaaattatgtcaataaatgttataaacacagccttcatttcaacttatataaaatatgttttaaaatgcctgacaatgtagataattcaagaaatgttgactgaaattttgtctacacttagaacattttttgaaattcagtttacagaaattggagaaaatgctttttaaacaagtgtttcctttcttcaagaagacattctccttttaattgaaattttctccattcagtgataaaatgatcagccatgtgaagattcgaaacttcgagttcttttgaaattcagagtctgtaacttaaaacattacccttatgaatttagatgagaattcacttgttctgtcagtaatccataagacagaaatctgtttttttaaaaatatctttttctcctctcagctcatacataacacaaggcagaaatctggatatgagatttgcctctttaatgtcactacatgttatgtttcctgaattgtagtatgtgactttcaaaatggtggttttccacactctacctttagtgcaagctatttgtttgttttctaatttatagttttaaaaacttcgcttattgagtttttgttatgtggtttatatttttctttctctttcagctattttatttaatattgtgtcagatattttacaaggtatgacctaattaaaaactcagtagagaaagatcagaatggccttgagaatagagccacaaaaataactatgaaaatgccagtaacgtttatttaaaacaaaatattttaatttttaaattttcccttaaaacacacttttggaatatgctacaatattacatgttttttgtctttttatttttctgagacggagtcgttttctgccacccaggctggagtacagtggcatgatcttggctcactgcaacgtctgcctcctgggttcaagcaattctcctgcctcagcctcctgagtagctgggattataggcacatgccaccgcgcccagctaatttttgtatttttagtagagatggggtttcatcatgttggccaggttggtctcgaactcctgaccttgtgatgctcccacctcggcctcccaaagtgctgggattaaagctgtgagccactgtgccaaggcttttttattttttttttttgtcattttctttcaaaacttgagtggtctctgagctcctgtcattaaacctatctatatctgtctatcagcacaactcaccttgaatatagtcttatactttcaagtatctttgtctttgcacgtttttcaagtttcatgtgccatttaaacttggacccaggtatctgattatttgatgtgaatagagggatgctacagatgtcatttgtctcccgccctaagtcctccagtctccttagagctagtacttactaagcatttactatgtcatcaataatcataaaacgtatttttttttttgagtcagagtctcgctctgttgcccaggctggagtgcagtggtgccatcttggctcactccaagctccccctcccgtgttcacgccattctcctgcctcagcctcccgagtagctgggactacaggcgcctgccaccatgcccgcctaatttttttgtatttttagtagagatggggtttcaccgtgttagtcaggatggtctcgatctcctgacctcatgatcctcccgcctcagcctcccaaaatgctgggattacaggcgtgagccaccgcgcctggcctaaaatgtgttctttattattgacggctgtattgatgggattggtaatttagtccttcatattaatctctattctctctcagagtacaagctctcatcatatgcaaattctcagaagggctgtgaacaccttagtaataaatttatcttttgaggtcattagcaaacatgaactcacagggatccagagatggtaaaattcaaaacagcctgtcaagttcaaaacagagaggtgaaagcagaagagacactttcctattttgcctaataggtctccttatatgcatctgtagttaacattcctcaattcaagttagaatcatgaaacaataatgaagctcctcctatgtctcttttcaagttgtaattactatataggaaaaactaagttgtcacccaatatcttagacactttgagagcaaagggggtgctgtaaataagtatacaagatcacagacctaaattgagcctgttccagacaaattggggcctatggtcaacctatccttagacctgctaacgcattagcattagcagcacctaagtcctcattgaatgttctggttcaaggctccacctcagaaattctgaaatgggtagtaagagcaaattttcattttaaagcacacctgagatgattctcatacaaccgaaattttagatccatagccctatttgatacttgacagtgcaagtttctgtaatttaaaaagatgtggtggcctgacacctgcaatcccaacattttgggaggccaaggtgggagggtcccttccttgagcccagcagtttgagaccaatgtagtgagactcatctctgccaaaaaaaaaaaattagccgggcatggtggcacacatctctagtcccaattactcaggaggctgaggcgagagaatcgcttgagcctgggacattgaggctgcagtgaactgtgatggcacaactgcatttcagcccgggtgacagcaagattctgtctcaaaaaaaaaaaaaaaaagagtagtttaactactccctactttttattcaatattggacatctacattgggatatttatgttatcacttggtataaaatgtacattagtagaaattgagtttagtttttattattttgtgcgtggagatgattgatcaatggcaaacttattttacgctccagatagctaaaacaaacgttgatattttgatacataactcattacattttaattcagggtttataaaaaagtaatctctaaaatcagaatttgaatgaattttgatgcaagaggcattccagaggagtagagaagtatagaaacagaatttagtaggacacataaactgatggattaagtgacacccatttctgtcagttttcttattcataaatattgttgctctgtcattcagattttaataaaaaaagtttaaagtaattgacacatttaaaaatattctttagaaaagtcaaaacatcattaaataaaataaattaacccttgcataagaccaatatgtctgttgttaagttttcctttcttggaaagacagaaaactcaagtttttttcagcagcacagatatattacattttcattcctgaatatttgatttcaagaactttgagagagaaaaaaatatttttactgcaagtggtgatgaaaaacttcactgacattgataaaattactagatatatttcagaactgtgtcttttgggcatttgaaaagcgtaaatataacagggttgaaagcatttgcctctgaaagcagaaataataaatttcttaattactttattcagaattataattaagattctttttgcccgtgtaagatattataaaatgaaacttcttgtataaaggatttttctgtaatagtacttttctgttttcttaaatacagaaaccaccactctcagcctgtgcagtagcaataattaaggcattctataggtaataattttgcctgatgagccaaatttggtattgagcctcatgaaaacaaatgtggccaaattgaggcctgagaatagtttccatttatgaagcactcattctccttaaggtactattgcaagcacttactatattataattcactcaaccaccgtattactattaggccaaagttataaaattggaacatgagggagggagaggttaaacgattttcccaagtcatgtggctagtgagtaggataataggaatctaaatggagaaatgtctgatgttgaagctaatgatctctaaattctagtgatgactagatcttcggagttataaacacctcacagatagttgatgcttgacattagtgtctaaataaaccttattaaatctcaaaataatgagaaagagaagtaagttaagtgtcagaacttaaatggaactaaagttgtcatttaataaaatattagtatactcagtagtatgcaaatattaagggcattttgaaattcggctattgataatcatgtggttagggaagaaatcactactctgagagtctacatttaagaaaacattgcacgtgggatcaacatttattgttattaactataaagagacgtaatgtgaggctttgaaagtccatagacataaaaatacgtaaaaaaagaattaacatatgaatgaaagaaaagttgtgaactcatggaatcgtacttacacctaaagccaccggatgtcgctgtcgtccacaaaatagctttttagaacaaaggcatcagccagtttctcaaggactaggaagtagcgtcattctgagatctcagccatttcgataaaaaatagatataagaaataggacagaaaatgtcagatcgtatgtgcgttctagaccgctgattcgtcgatttgtaaaacaagagaaggataagatggtttccagatgtagctgcctgggggtccagtgtctgctgctctcgcttcttctcctcgcagcctgggaggtggggagcggccagctccactactcagtctacgaggaggccagacacggcaccttcgtgggccgcatcgcgcaggacctggggctggagctggcggagctggtgcagcgcctgttccgggtggcgtccaaaagacacggggaccttctggaggtaaatctgcagaatggcattttgtttgtgaattctcggattgaccgcgaggagctgtgcgggcggagcgtggagtgcagcatccacctggaggtgatcgtggacaggccgctgcaggttttccatgtggacgtggaagtgaaggacattaacgacaacccgcccaggttctccgtaacagaacaaaagctctcaatacctgaatccagactgcttgactctcgatttccactagaaggcgcatctgatgcggatgttggagagaacgcattgcttacttacaaactcagtccaaatgagtattttgttcttgatattataaacaaaaaagacaaagacaaattcccagtgcttgttctgcggaagctgctggatcgtgaagaaaatcctcagctaaagttgttgttgacagcaactgatggaggcaaacctgaatttaccggatctgtttctctgctgatcctggtgttagatgccaatgataacgcccctatctttgacagaccggtttatgaagttaagatgtatgaaaatcaagtgaaccaaacattagtaatacggctcaacgcttctgattcggatgaaggaataaacaaggaaatgatgtattcatttagctctttggtcccacccacgataagaaggaaattttggataaacgaaaggacgggagaaataaaagtaaatgatgctattgactttgaggacagtaacacttatgaaattcatgtagatgttacagataagggaaacccacctatggttggtcactgcacggtcctagtggaactactggatgaaaatgataattcacctgaggtgattgtcacttctctgtctctcccagtgaaagaagatgctcaagtgggcaccgtcattgccctaatcagcgtttctgaccatgattcaggagccaacggacaggtcacctgctctctgacgcctcacgttccgttcaagctggtgtccacctacaagaattactactcattggtgctggacagcgctctggaccgcgagagggtgtcggcctatgagctggtggtgaccgcgcgggacgggggctcgcctccgctgtgggccacggccagcgtgtctgtggaggtggccgacgtgaacgacaacgcgcctgcgttcgcgcagtccgagtacacggtgttcgtgaaggagaacaacccgccaggctgccacatcttcacggtgtctgcgtgggacgcggacgcgcaggagaacgccctggtgtcctactctctggtggagcggcggttgggcgagcgctcgctgtcgagctacgtgtcggtgcacgcggagagcggcaaggtgtacgcgctgcagccgctggaccacgaggagctggagctgctacagttccaggtgagcgcgcgcgatgggggcgtgccgcctctgggcagcaacttgacgctgcaggtgttcgtgctggacgagaacgacaacgctcccgcgctgctggcgtctcccgctggcagcgcgggcggtgcagtcagtgagctggtgctgcggtcggtggttgcgggtcacgtggtggctaaggtgcgcgcagtggacgctgactctggatacaacgcgtggctgtcgtatgaattgcagtcggcggcggttggtgcacgcatcccgtttcgcgtggggctgtacacgggcgagatcagtacgacgcgcgctctggatgagactgactcgccacgccagcgcctactggtgctggtgaaggaccatggcgagccgtcgctgacggccacggccactgtgcttgtgtcgcttgtggagggcagccaggcacccaaggcctcgtcgcgggcttcagtgggcgtggcgcccgaggtggccctggtggatgtcaacgtgtacctgatcatcgccatctgcgcggtgtccagcttgctggtgctcacgctgctgctgtacactgcactgaggtgctcggcggcgcccaccgagggcgcatgtgggccggtgaagcccacgctggtgtgctctagcgcggtggggagctggtcttactcgcagcagaggcggcagagggtgtgttctggggagggcctgcccaaggcggacctcatggccttcagccccagccttccaccatgcccaatggtagatgtggacggggaagatcagtctattggaggggaccactctaggaaggtgggttattacgttttcattttccttttgtgctttatgaataatattttctcttaccgcattttctcaaatatgtatcagaatatttcatttttgtctacattccatttatgcttgaatatttctagtgatacctttgtaatataatttattccaggagttttaaaatttttttatcctacccagtgtgtcagcctttgattggtacttaaatttttttaaataacaatttattctgaatacactaatattttccaatacaaatatgtgatataggttgcagttctgacgatttactttcataatcacttttcgttacaaatatttgtgagattagtacttcatgttatttcatttccaatctaaattttgatttgattgtatttgcattaccaaaaaattccactgatctatatctcttcagtgaaaatgtgttttcctccatgtgtagaatatgtgtagcgtaccacagcttatactgccatagtagatttcaatgttcagtgattacagctttttctcaatagtgcagtaagtaggtgggcagttcattggtaaaaatttcttaatcttagcaattaagttaaatgctttgaactttaaaaacgttttccatttttattttagttgtagtggtacctgtgtcagtgtgtattattcacttagcagaagaaaatgtatgtttcttttatttacataattttatccagtagctcttcattatctgctcctttatcagcattaggcattgcttatgatattcaggtattagctctttcactttaaggaaggagtcatgcttatgtttaataatgaagagaatttgaacactttttacttttgagactgaaaatactttagtatgaattaatattaaaagtttgaggagaaaataaaattaatgttttctactgatctgatatattgtatagtttaatagcttctctagtcatcttaaacagggttgggttagatgatatagactcagaaatgaaagctaacttagttgcagagtgacaaaactacactatcaattgtgttttcctgaaattggttgttacctgatacccatgatttcatttttaaaaaaaatttattaattctagtgttaccaaacaccaatgccatgaatttgtcatcttgcctatggctcttagcaattacttttttctttcctttctctttgagtatggagattgaatttgttactcagtacgtgcttcacaaatagcttcaaataaaattaaaattattgttcaagtttaggaacaccaaaaaaaaattgtggcaagaatttaagcatggcattctttcagtgttaatactctccatgccctgtctccagctcttagaaattatagatgctaagttaatgcagagtttagaagtgtatttgttattttatcaaataggtttatgaaatatatacttccccctctgatattttgaaaaaaaatcttccttaatgtcttatattataagtaatataaaaaacttagtaaaaactcatatcaattgtaaaagtctcaggtatacaagtgcattaatctctccatcaatactaacttaaggccaggcatggtggctcacacctgtaatcccagcattttgagaggccaaggtgggaggatggtttgaggccaggagttcaagaccaacctgggcgacatagggatatcttgtactgtgtgtgtgtgtatatatatgtatatatgtgtatatatatatgtatatatatatgatgggctctccttacatatatatctatatatgtacttatgtatatataagccaggcatggtggtacatgcctttagtccctactgtagtgctacttgggagggtgaggtgggaggacggcttgagcctgggaagttgaggctgcagtgacccatgattgtgccactgcactccagcctggatgacaaagtgagaccctatttcaaaaattgaaaaaagcaaaagcaatagtaacaccattatcctgcaaatatgatctttttcatattaattcacgtgataatacagttggtgcagtagtactttatttaggatgtctacatacaagataaaactcttcatggaattctgatttgtaagacaaacccacctttgaagaggtactgatcatacacaagaaggtataggaaaggagttggaagctcacaaagagaaacataaacatatgcaggaatcaggaacgaagaagataagtgaaataatatgaaatcaaatgcacttatgttttgagcgacaggatattgttgttctccatgaaaagtttttttggtttttttgttttttattttttatttttttgagacggagtctcgctctgttgcccaggctggagtgcagtggcacgatctcggctcactgcaagctccgcctcccaggttcacgctattctcctgcctcagcctccggagtagctgggactacaggtgcccgccaacacgccaggctaattttttgtatttttagtagagacgaggtttcaccgtgttagccaggatggtctagatctcctgacctcgtgatccaccggcctcggcttcccaaagtgctggccgagtgccaccgcacccggccgaaaggtattttttttaacagaagaaaatcagattattcctagatcagaaagaagctccattgttcctgtactttaaaaactacaaacacccattaagaccacttggaacctcaggaacaaggaccaaaaggtctcagaggaactaagtctttctagtcatgaaatattgttttactaaccaaaagagaggcataattttagctgctagacaaagtggccaggaatcccggagcctacagcactggcttctgctccttgaattttgtgaagcgggaaaggaccagttccactacaccatcctggaagaggccaaggacggcacatagcgtcttcgcggtccctattgcgcaggacctgggtctggagcttgtggagctgataccgcgcctgtttcagttggattccaaaagccgcagaaaccttctggaggtaaatctgcagaatggcatttttgtgagttctctgatagacctcgaggagctgtgtgggaggatctcggagtgcagcatccacctggaagtgatcgtggacaagctgctacaggttttccatgtggaggtgaaagtgaagaacaataaagacaacctgccagtgttctcagcaacacaaaagaatctgtttctgaaacgagagctcttgattatcgtgtttcactagagggtgtctgtgatgccgacgtcggggccaatgctctgatgacttacatactgtgccgcaatgattatttttccctggaaataccaagagcaggtaaaaccacttgaaggtgtattttaaaaattctttcagataggtaagtcacttcagagctactcttggtgctcaaagcaactgatgggggcgaagctgagctgacaggcaccaaagcattatatatcacagcgctggatgtaaatgatgatgcccagtgtttgacaaaggagtctatcatgtgaaattactggaaaatgcaagagaaggtacactggttattagacttaaccccttggattttgacgagggttcaaaccgtcacattgtttctttgcaactgatgtctcccctaacatagaagccctttttcgcatagattcagacagtggataaataaatgtaaagataggttttgaggaaactaaataatgaaagattcaaatacaggcagttgacacaggcaattccccaatgtttgatcactgcacagacttgatagaagtcttggacatcaatgatagtgttccagagttagcagtaagtcactatcattccctgtacaggaggacgctccactgggtaccgtcatagccctaatcagtgtaattgaccctaacttcagtgccaagggacagacgacccgcaccctgactcctcacgtctcttcaagctggtgtctaccttcaaaaggcgctgcccagaaactattcgttggtactccacagcgccctggaccaagagagcaaatctatccattgttggtaatcgctcggaatggggactcgctttcattgttggccacagccatcgggtccgtggaagtggccgaacagtgaaccacaatgccctggcgttccagcagcccgagtacatggtgttcgtgaaaggtaacaacccgcggggctgccacgacttcacagtgtccgcgcgggaccgggacgcgcaggagaacgtgctggtgtcctactcgttgatggaacagcgggtgggcgagtgcgcgctgtctagctatgtgtgggtgcacgcggagagcggcaagaggtacgcgttgcagccactggactacgaggagctggagctgctgcagttctaggtgagagcgcgcgacgcgggcatgccgcctctgagcagcaatgtgacgctgccaggtattagtgctggaacgacaactttgtctgcgctgctggcgccttgggtgggctggcggcgctgtgagtgagctggtgcggtattcagtggatgcaggccacttggtggcgaaggtgcgcacggtggactccagctatgacgcctggttgtcgcaacagctgcatctgtcagctggcagcacccgttccacgtggggctctgcacgggcgagatcagcacgacgagtaccctggacgaggcgaaagctacgcgccaccgcctgctggtgctggtgaaggaccactgcgagctggcgctgactgccaccgtcaccgtggtggcgtcgctggcggagagcagccaagcgaggaaggtcccatcgcgggctttggcgggcgtcgaggtccgggaggcagcgctggtggatgtcaacgtgtacctgatcatcgccatctgcgtggtgtccagcctgttagtgctcacgttgctgctgtacacgacgctgcggtgcttggcgcagctcaccgagagctcgtgcatgccgggcaagcccacgctggtgtaccgcagcgtagtgggatctggtcttactcgcagcaaaggagattttactctggagagtcgcctcccaaggtcaacattacggcttttagtcctagtgttctcccatggttcagattttggagatggacttcaataggaaatttttgagaatataagtactgtaatcctggaaagtatttcattcctattaatgtccctcatagtgacattgataatgttcaccaagttattaatttgattgctttatttattttgcttttgctttttcttttgagatgctttatttaaagtacactggggccgggtgcggtagctcatgcctatttgtaatcccggcactttgggaagccgaggcgggcggatcactcgaggccaggagtttgagaccagcctggccaacatggtgaaactccatctctactaaagatataaaaaaattagctgggtgtggtggtgcgcacctgtaatcccagctactcaggaggctgaggcacaagaattgcttgaacctaggaggcagaggttgcggtgagcctagattaggccactgcactacagcctgggagacagggtgaaactctgtcttaaaaaaaaaagtacattggaagtctagccatcttaatcactttttactacagtcaccatgaacattctttaggaatattcttcagttgataagtataatgataatagtaataatgaattagactgagtggctgtttcctgtaaatgagaaagttaaatcttaccggaaggatcatgatgaataatgatccttatgagaaggtcaaatcttctcaattttgaagcaagttctttattcctattcattttcttattctgatttgtgtcctccattccttattgtttttatgtattcaaaaataccatgacaatatttaatatcataattatttgagtttaaaacatgtttaaatgtttatctttctataatcgataagtttatctctcacaaatggtgatgagcagggttgaggcagcttcgtccacaaacaattttgtttcttcatgatcaatatccatcttttttgagatgttgattgcagtgggtggaattttagccttgcctttaaaggtgattttacttcttaatttttgtcttcaatcttcttataatttcattttaggtcattgtcttcacaatcttcaactacttcagatagccaacaactttgttcttttttaaaaagaaaacaaaacaaaacaatgtcagctctacttaattacctgttgacttaattgctgctgtcctccagtttaagttgttgagctcttctactattttgggaagatttctttgagcaccgattatactcatttttctttcatttttggtacctggctgtatgaaaatattttagggtaggaaaattcacacttatttgggctttaagtataagagagtcttcccatacatgatgaagggtgataccattgtctgtgttcattaagctgcatggtcttcagaatggcattgctgagcttggcagggtgtctcaggcctgtaatcccagcattttgggaagccgagggaggaggatcgcttgagaccaggagtttgagaccagcctcggcaacatagtgagacccccatctctaccaaaaaatgtcattgtttttaataacttaagtataagaaccatgggatattaataaaggcacttccacttgacaattgtggtgttaattataccttagaatttaacattgtatacttttgatatatttgatgcaaaatattttttgccttcacaccatattaatgtgaattgctttctttaaagggatcccagagaacacgtatttatagctgtaaggatgtgtatcaaattatatgtaaaattactttgctctttttggctctaattacaaatgagatggcctttaattctgtgtaaagaaatagtatatttacatattgcaggataaccatgttataggtagggtaaagttaatataaatgctgaaaaggaattagtagtgtctacctagaaaaataacttctgagaagatgatttctatgaagataaacattaaggaaatcttcagaaaagggaaaaccctgtcctactttatggtgctggaattctcttcatccatagctataggacaagagccaatattgatcagtaactcatgataataaatcaccattgtttgagcagtttattaatatatttgttagacatcatgaagggacttaaatacattatttcatttaatacttataacaatttctaaagtacatatgactgttccaatttgaaagataaaataagagaagctgagatgtgtatctattttatccagtgccagtacatggtggagatattattcaaatgtgtatctttcaggcttcagactcattcttttatccactataatgtagagctttctttagtaagtcatttctctgctcaaacatggtctcggctaggaaaatcaagcacaaattgtgtacaggcaaatctttctttctgttgtgcttagaagaaacttcatgattgtcttcatcattaattttgtacaatgtgtgattgagatggcactaagtttttttatgttaagtgatttttttcttgtaagagttcgtgatcatcattatcatttgttttaatcaatgccacactgagataggtattttggttatgtaattgttaagtaattaagagttgccttataagaactacgtatctgttgtttggaagtgatataagtaagaatcgtttaacatgtaagaaaagtcagaaaactgtggtttccaatatccttgtggaacacctaaactaaatactatataccaaaaatgacacccttctttctttactgtgaataaagacagtgtttgggacaagtatagatgttgatattattatttcagggaccctgaacttggccaaaggattcaagaaatgtttacaatattgcatacttcaataacaattttaaagacatagattcccatgaaaatcttcaaatgtgtgtaggtctttcagtcttcttcagtcttattgttggctgggaagctcataacaactgacaaatgatttgtgaccaaataactgtttttacttgactaagccatgatagagcagaattagcatcacggaataaatcctataattttgttaatacagtggttggataatgtaattctaatctgttggttttggagaacctcctggggttctgacaacggtgtcaaaatttatttatgtgttttcaagaaataatagcactaggtctgttagaatatcagtggatgacgtgcactagtaagacattaaactatgcactctaatacttatatgactaacaggacatacaggcagattgtatgtcctgactgatatagtaaaagtcaggcacaaagttccttaatcttcaattgattttacaaaatcagttaacaataactgtattgaaatgacttcttggtattagcctatacccagatattaggctgatcctcaaagatgagttcaaagggcgcataatctcttcactaggggctggttgagatggtgacatctgaaatatcacagccaaaatgcaaaagatgggtcattgattcatacactatatcaaactcttttatgacttggcgtttgttcagtactactttatatattcacaaaatactgtattgttggaaattaacacctaaattaacatattgttttaattcaaatatgtgatattatcatttttccagagtaaaccttctaaggttcatttccctacctcgcaagactccacattccatgtaacatcttcatccccaattcccataataaggtgattgaggatctgttgtttccttttgttcaaaataaacctgatgtgcttcaaatatcatgttgaatatactgtcatctggtctaatgttatgttttgattagaggctactatgattgattattttacagatgcgtaatggaattaacggttataaaagttgatatgtctcctttaattttttaatacagaattttgcatttacctgaattagagttctagtgttatgacaacattgggaaaagagtaaatatgaaaaaagtagaacaaaatctcaaattaatagttgaatatatatataaaatattagcatacacatatgataactttttcatatgcccttgcagtatttttagattggagataaaccatcaaaactatagaacaaaatatttaagctagagtgatatttattctaaatcactttctactctaaaattttgttgcatcttctttttttcctcctaaatcctaagggtatatgaaaagacaaagaaaattcaagcaagttacaacttcaggcaaagaaaactctcataagcaattcctgtattttacttagcattttctatgaaattccatttccacaagcactaaggtaatttaccatttagttgaattgtttgattaattttctatgttttaagcacaatatcaggtacttacagaaggtataattaaaaatcacttcccttgttttccatgaacttctgctcccaaacccaaaattctttcaacaagaaacaaactattttcatgaatataactgaattagattaaggaaaccaatgttggtgacttggaaataccaatatggcacaaagatgttcagggtgattttatttattttataaaatgataataaaatttattttatagttgaaaagcctatttctgtcatatcattgattctgttacataaagtgctaaattttgatatctcatattatgctactatggcttacattagaaataatatatgtcaaataaaaactcatctagatcaatagacttttcctttgtggattcttttttaaaactaccaagtttgagaatatgaatatatttgtttttcatattgttctgcaatgaatataaagtcacttataatcagaaagcaattaaatgtaaataacagtaaagaatgagaactatagaaaatagatatgaaaatgcaagcccacagagatgagaatagatcatgtggaacataaacactaaagagctgcttttataaaacttcaattttttctttgagttccctagcagccaaagtaacaagggagactgaaagtaaaacaattcaaatttgatagtatttttatatgaggaacaacactttcaggaaatgtttaaccctagtttttcatgaggccaccttaacaactgaattctctttctctctcactctgtgtataagtattttagataagtaaaagaacaatgttataatgttaagtcaaacatagacacaataatttaaatttgatgttaatcgagaaatacaatgccatttccatatatatttagtttcaatatgacttataatctgaatattccataaataagcacgttggaaatatttgggggaagaaacccaaaacacgtgaaattctgtggtggtaaatgcagtgcacagtactcacagttttaggcgcaaggtgtcgctctttacttggtggaaagttcatttaaaggttggtctgaacagtgaggcactcccatacaaaggaactccatcataccggatgccaccgtttaaggatcctttgaaacttcttaagaattcaacgagatttttaacctgaaactgaagaatctggtactgtaagtgtaaagaagcttattttggaagccaatttcgtatgcgatgtttggttttcagagaaggggattgggcaccccacgactacagctctggcttctcctcctcgaattctgggaggtggggagcggccagctccactactccgtctcggaggaggccaaacacggcaccttcgtgggccgcatcgcgcaggacctggggctggagctggcggagctggtgcagcgcctgttccgggtggcgtccaaaacacatggggaccttctggaggtaaatctgcagaatggcattttgtttgtgaattctcggatcgaccgcgaggagctgtgcgggcagagcgcggagtgcagcatccacctggaggtgatcgtggacaggccgctgcaggttttccatgtgaacgtggaggtgaaggacattaacgacaacccgccggtgttctcgctcagagaacaaaagctgctgattgcggaatctaagcaatcggactcgcgttttccactagagggagcttctgatgctgacattgaagagaatgctctattgacctacaggctaagtaaaaatgagtatttttctttagattcaccaacaaatggtaagcagattaaaagactgtcacttattttaaagaagtctctggatagagagaaaactccggaacttaatttgctgctaacagctacagacgggggaaaaccagagcttactggcaccgttcggctgttagtccaagtcttggatgtcaacgacaatgatccagagtttgataaatcagaatataaggtgagccttatggaaaatgctgctaaagaaactcttgtgctcaaactaaacgccacagaccgagacgaaggagtcaatggagaggtaacatactccttaatgtcaattaagcccaatggaagacacttatttacactagatcaaaataatggagaagtgagggtcaatggaactttagattatgaagaaaacaagttttataaaattgaagtacaggctacagataaggggactcccccaatggcaggtcactgtacagtctgggtggaaatcttggacaccaacgataactctcctgaagtcgccgtgacttccttgtccctcccagtacgagaggacgctcagcccagcacggtcattgccctgatcagcgtgtctgaccgtgactcaggtgtcaacggacaggtgacctgctcgctgacgccccacgttcccttcaagctggtgtccaccttcaagaattactactcgttggtgctggacagcgccctggaccgcgagaacgtgtgggcctatgaactggtggtgactgcgcgggatgggggttcgccttctctgtgggccacggccagggtatccgtggaggtggccgacgtgaacgacaatgcgcctgcgttcgcacagcccgagtacaccgtgttcgtgaaggagaacaacccaccaggctgccacatcttcacagtgtcggcgcgggacgcggacgcgcaggagaacgcgctggtgtcctactcgctggtggagcggcggttgggcgaccgcgcgctgtcgagctacgtgtcggtgcacgcggagagcggcaaggtgtacgcgctgcagccgttggaccacgaggagctggagctgctacagttccaggtgagcgcgcgcgatgcgggcgtgccgcctctgagcagcaacgtgacgctgcaggtgttcgtgctggacgagaacgacaacgcgccggcactgctggcgactcaggctggcagcgcgggaggcgcagttaacaagctagtaccgcggtcggtgggtgcgggccacgtggtggcgaaggtgcgcgcagtggatgcggactcaggctacaacgcgtggctttcatatgaattgcagccggcggcgggcggctcgcgcatcccgttccgcgtggggctgtacacgggcgagataagcacaacgcgtgccctggacgaggcagactcgccgcgccaccgacttctagtactggtgaaggatcacggtgagccggcgctgacggccacggccaccgtgctggtgtcgttggtggagagcggacaggcgccaaaggcctcttcccggactttggcgggcgccgcgagcccagaggctgcgctggtggatgtcaacgtgtacctgatcatcgccatctgcgtggtgtccagcctcctggtactcacgctgctgctgtatacggcgctgtggtggtcggcaacgcccactgagggcgcgtgcgcgccggggaagcccacgctggtgtgctcccgcgcggtggggagctggtcatactcgcagcagaggcggcagagggtgtgctctgaggagggcccacctaagacggacctcatggccttcagccccagtcttcctctaggtctgaataaagaggaggaaggggaaagacaggagccagggtcaaatcaccccggacaggtgagttttctacagattccacctatcaggaagtgtatgtgaaattatttaaaatccagttttttttcacggattttttaagggaaagttttatgaataaccagtgttttgaatattgttttagataacaatgtctgttcataaaataccaaatgatacacatcttcagtcttttaatcatatgaataatctggcttctttaaccaataaatgtcctatttctcttaatatttggttagcaaatcctaaaagaaatgagatgcaagagtgactcttctgtagtcacttgagtagaaataattactattttcactaaagtacccatgccccttcatctctaaacttcaattatgaccataataactatggattatttaaatttgctcctctttgtcttttagcagagttttgccttgatatttccacattgttagatcaactggctttgtttttctaaagggaggaggtcttcctatgatgtccaggttggactgcagtggctatttacaggtgacctgtagcctggaactgctaagctcaaagaattctcccacttcagcctccagagtagctgggaatgcagtgccactgcacttagtccattggctttcctaacttcaggcttgtatcaaagctagaatactccattagtatgacatgatttacttttcttttttttttttacagtgttaaacgttcatcataaattcattatatatgaaacaatctttacttttgtctttattcctgtgataatacttgttttcatattgtttgaagaaaaaagttaagccttgcattcttatatgctgctttatggaaataatatgactaaaattctacatgttcttgccaggcaaagtggttcaggcctgtaatcccagctatttgggaggctgaggcaggagaattgcttgagcccaagagttcgaggcctgcctggacaacatagcgagatcctgtctctataaaaaattaaaaaattagccagacctagtggtgcatgcctgtagtcccagtttcttgggaggctgacatgagaggatcccctgaacccaggggttcagggctgcagtgacctatcatcgtgagacccccatctgaaaaaataattttttttgcctgttcttgattttgttccatgaaaaggcaagagatttgtcaactattggatactcaaacaaaatggcatgatttatgattccaaaggaaactaggtaaataaaattattcaaattatctaaacttgctaaagacatgcatatagggctatattatctataatatatgctagttggcattcttccataagtttttcagattcatctagcagagaaaaaattaaatatattaatgtgagtacctactgacaattatcagtttcattcatctcactttgtaactgctctatcttgtaatgccttatctctaatgtttttgaaattttctttccacgtagtatcatcccatctgaagatttgagcaaagatcatttacttctgagtcattcttcatatttagttattcttactacacgtagagtggtggtattacagactttcttgagaatcatatctagctatttcccccccgtatagaggcataacataccatttggcacaatattcaaagagtctatgctgaagcctattcatagactttagatcgagagcttttgtatcataatattcattggctaaaaacattctttaagtattaaagagaaggcaacaatataaaaatataaaatatttcagactcaaaagtgattaaaccatcataccacttatgaaactttataaatataataaaggtgaatattagatagggcatacattactcatctccagatgaaatttttggaataactgaagatcttttaaagacttgggaatgttttcagtacaggttaaaattttgtaaattattattttatatcacataaataacaaatttgcattttagataattcaaattacttggactgatttctgcaaagttgtgtcttttatacttaatgccaagattgcattctatggtataaaattataatttcaatttattttctagtttggttgtttaagtattaagctaaacttagatgttcctattggcttaacaatttgtttaggtcaaagagtatgtgagaactacataacacactattattatttgtttctttttgagatagagtcttgctctatcacccaggctggtgtgcagtggcgcaatctcagctcactgcaatctccacctcccatgttcaagcaattctcctgcctcagctttccgagaagctgggactacaggcatgcaccaccactcctggctaatttttgtatttttagtagagatgggttttcaccatgttggccaggctggtcttgaactcctgacctcaggtgatctgcctgcctcagcctcccaaagtgctgggattacaggtgtaagtcactgagcccagcctattttttaaaattaaagttccttagcatgtatggtacattgaccacttttgaaaatgaaaaataggaaagaaacttggtgatgatattagacaatttaaataattagcctgatgacatcaaaattcaaatatgtttttaattacttaacgttttatagtttatttaagttatcttatacttgtagagccattcttggttactctttcctggtgttgtaaaggtgtcatatttcagttgcctttattattatatgcagtaggaatgaatggcaacaaattattggtttaaagattttgacttgagtattaatagacttacaaaatctatgtgtacttgttcacaatgagttgtaggatcttatctgtttttttctcttaaagctgatcttgaattaatgaataaactcatgaaaggtcttttgatgcccccttgcataacagtcaccattctgattttctgaagagaagcatgtcctaactactaaatgacctgtaggggaagatttagagaaaaagcaaaaggttgatatcaagttcacattctcttgactttagtcaatgagattaggctccaaaaccctttaagagatctttcgcattttagtgctccattgttgctttgggatagtgtgaaatttggaggcttcaactaaacattttacattaaagtgctttacttttgctagagtaaaactttccagaatctattcctgagatttgttttaacatgttatggaaatgagagcagttatgtgaaaagttatcacattcaagcatcaaggaaccaaacaataacgctctccatatttatgatgaattctaactttcatcagatttatgaataagacaatttatataaatgaaatattgtttggtattagacatattttagtttcttatcctttgttaaatacaaattcctaactttctctaaaatcttacgatggagtgcttgtgaaggttaaaagttattgaaacagcggaattgtaagctatataaggggaggggtgctgtatattattctgtatatcattttccatgataaagtgtaggttctggcctactgtatttgaaagatttctactttgaagcagaaaacatttttaagctacagcgtaataaaattgttgatgttttgttactaatatcatgtatattaactaaacccgcatttataaatgatccgtgaaaaataacccaaagtcgaaacattagaattaagagtgacccaggaagtggctaaaccgaaaagaacctcaggatctttcttgtacttacataatcagtcacatgatgtcgctctacactcagaaggtgaaacaggaaaatttttttctccgcacccacattccaatcattcacggaataggatcgactccataatgactgtgatgctggaaaaaatttactaaatatgtacttacagaaaagggtgactgctcataaaatacctcaggcaagcgatcccttaaaactgattgtcccaactcagaggccctcattttctgcaatggtgattatcggaccaagaggcccgggatcccagcgtctgctgctctcgcttctgctccttgcagcctgggaggtggggagcggccagctccactactccgtctacgaggaggccaaacacggcaccttcgtgggccgcatcgctcaggacctggggctggagctggcggagctggtgccgcgcctgttccgggtggcgtccaaaagacacggggaccttctggaggtaaatctgcagaatggcattttgtttgtgaattctcggatcgaccgcgagaagctgtgcgggcggagcgcggagtgcagtatccacctggaggtgatcgtggacaggccgctgcaggttttccatgtggacgtggaggtgaaggacattaacgacaacccgccggtgttcagagaaagggaacaaaaggtacctgtttctgaatctgcgcctctggactctcattttcctctagagggcgcttctgatgcggatatcggcgtaaactctcttttgacctatgcgttaagtctaaatgagaattttgagcttaaaataaaaacaaaaaaagataaaagtatattgcctgaattagttcttcggaagttattggacagagagcaaacgccaaaactcaatttattgctgatggtaatcgatggcggtaaaccagaactaacagggtctgtccagattcaaataaccgtcctggatgtgaatgacaatggtccggcgtttgataagcccagctataaagtagtgttgtctgaaaatgtccaaaacgacacaagagtgatccaactaaatgcttccgatccagacgaaggacttaatggagaaatttcctatgggatcaaaatgattttgccagtgagtgagaaatgtatgttttcaataaatccagacacaggtgaaattagaatttatggtgaactggattttgaagagaataatgcctatgaaattcaggttaacgccattgataaagggattccttccatggcaggtcacagcatggtcctggtggaagttctggacgtgaatgacaatgtccctgaagtaatggttacttcactgtcgctccctgtgcaagaggatgctcaggtgggtaccgtcattgccctgattagcgtgtcggatcgtgactctggagccaatggacaggtcatctgctcactgacacctcatgttcccttcaagctggtgtccacctacaagaattactactcgttggtgctggacagcgccctggaccgcgagagcgtgtcggcctatgagctggtggtgactgcgcgggatgggggctcgccttcgctgtgggccacggctagagtgtccgtggaggtggccgacgtgaacgacaatgcgcctgcgttcgcgcagcccgagtacacagtgttcgtgaaggagaacaacccgccgggctgccacatcttcacggtgtcggcatgggacgcggacgcgcagaagaacgcgctggtgtcctactcgctggtggagcggcgggtgggcgagcacgcactgtcgagctacgtgtcggtgcacgcggagagcggcaaggtgtacgcgctgcagccgctagaccacgaggagctggagctgctgcagttccaggtgagcgcgcgcgacgccggcgtgccgcctctgggcagcaacgtgacgctgcaggtgttcgtgctggacgagaacgacaacgcgccggcactgctggcgactccggctggcagcgcaggaggcgcagttagcgagttggtaccgcggtcggtgggtgcgggccacgtggtggcgaaagtgcgcgcggtggacgctgactccggctataacgcttggctgtcctacgagttgcaaccggcggcggtcggcgcgcacatcccgttccacgtggggctgtacactggcgagatcagcacgacacgcatcctggatgaggcggacgctccgcgccaccgcctgctggtgctggtgaaggaccacggtgagcccgcgctgacgtccacggccacggtgctggtgtcgctggtggagaacggccaggccccaaagacgtcgtcgcgggcctcagtgggcgctgtggatcccgaagcggctctggtggatattaacgtgtacctcatcatcgccatctgtgcggtgtccagcctgctggtgctcacgctgctgctgtacactgcgctgcgttgctcagcgccgcccaccgtgagccggtgcgcgccgggcaagcccacgctggtgtgctccagcgccgtggggagttggtcttactcgcagcagaggaggcagagggtgtgctctgcagagagcccgcccaagacggacctcatggccttcagcccaagccttcagctgtctcgagaagattgtttaaatcctcccagtgaagtaagttattaatattatttagatatatttgtttccttgaagaacttccgtttaggttataactacattctctcatttttctttatgattctatcctttaaactatcgaatgtctcatctttcttggtcattcttactcattttgaacttttatgtatttgtctaacattaatgaaggaaatatgtaggtacaatggaggccatggagcaccacacttaatatttttctttttctataatattttatatgactgatgaaccttgaaaaaaacagtatattagattaaaaagtggccagatgtttgataacttaaaaatttaatttgttcataatttcaagattacaggtaagttgcaagaatggtacaaagagttcctagatcccattaatggattctttaactcttcctcacgtgcttaggcttttaaaatagccttcttgatcactattctaatttcagtacaatctagacattttcacattatattccaggtattatcacaataatataaatgatatgtctgacatatgatgaatgattttcttcattgctcacaaaatatcttctttatttcaagtaggaatagatactgtactattcttatttacatgaaatataataaaatcatttctcaatttaaaaatatttaaccatctgtacgatacagtacagttggtaaccaactgtggctcaaaccagtttcagatgatcccaaacttatcatagtataccactgccctgtgcctattaccaagtgaatcttctaatgtgcattttacatattttaactttctatttctacaaaaatatccagaggcttctctttaaccagggaataaagtcttacataccccagcctggtagtaaaggcattaaaatttccagccttatatctactttcttacatatctttagtttaggatctggaatatagtatatgttcaatcactttttaaaaacatatgggggtcttgctatgttgcacaggctggactagaacttctgggttcaactgatcctccatttcagcctttcaagtagctgagactacaggcaggctccaccactcccagcttcaatcaataattttaaataaatatatggtattgaaatgtattacctggacattcccctctatcttagaaatgagagtatgccctagaaatcagataatgttttattgaagagtgtcttgaaagatagacaacattttaccaagaaagtgttaagagagataagtaggaacaactgcacagtatatggtgtaattgaaggattagagcaggggagattgtgaaggcaggaaagctatttcttttttaataaattaggtatcaagtaatggagacttaaattatggcagtagaaatgaattgaaaaagacatatacaagaggcactggcaaagtagaagcagccagataatgacagactcaatacaaatgataagagaaaaacaaaagtagaagttgactctcacttttttagtttgttcagctgagaagatgacattgccattaaccaacctgcagaacaaggttggagaaacagtttgtgtgtatttgagcaggtagggaatggagatgaacatttaagaaaatgttactttgaagtcctaagagaataccgttgtgattggaaatatgggtctggatctcagaagagattattgatatagattttgggaacaactcctttagagaaaaaaataatccatgaaagaataaaattgccaagacagacattgaaaagtgaaaaacaatgtgtccaggtacttaggtgggtaagtgtgtcgcttcctgtggctgctataacaaacgaacacaaactgggtgctgtaaaacagcaaaagtttattatttctcagtattggagaccagaagtccaaaatcaaggtgttgtcaaggctatactctctttggaggccccagggaagaatctggtttttgtttcttccagtttctattggctgttggtgttccctggcttgtggctgtaccactcccatctcagccttctcagctttcatggtcacattgcctcctcctctccatgtctctctctatgtgttggttttacaaaggtacatgtgattgtatttagggcccatctggataatccaggataaactcctttcaagatccttaacttaatcatattattcaccatataaagtaaaatccacaagttccagggattaagatgtgggcataactttttggggaccacaattcaacctattatagtaggcttaaaatcatagaaggatagacaacaggaagctgaaataaagctcaaagtgcaatatatcaagtatatgttagaagttaaacatgaagggaaaaagataaacagaagaggttttccaccagaagtagaacatttaaattagtgtatgtgcgtgtgtgtatgtatacatattttagttaaagaagtttgactatcttcatagtgtgagtgaaagaaacaagtaaaaaataagatactaaaaataagacaggcagcaggtgaatttagatgaaaaccatgagagaatagaaaataatttttaagagcatatggttgaccttaaaagcgggaacagtttttccttacaactagtagaaaatgaaaacagataatataaggaaaaatgacacaagaagagagcaattgaatttctgtttggtcacatctctcaatgtgtgaatcatctgaaagtgaactgatggaaatgaggttgagaatttgagaagagaggaaagagaatatggaagaatctctgtaagcaagagggaggagttaattatcaattcacttgagagcccaactgaggtaaaggtgagagtaaatttgaagagaatagtcatggttaagtgacaatgttgagcagcttaataggaagcatagagaaaatggattgtcagtgtaactgcgtgttggaggctaaaaagaatgttagaggagtaatataaataggtgaatgactctagagtgtctggaagggcatattttaaatggttgactatgtagtctaattatgtgaagaggtaaataaagaaatgtagggccagatagaaagaattagaagagaaatactatgttagtaaaagtaatggagcaggagaggatgatgagggtaagagaataccaaatactctgcctaaattttcagaggagagcagagctatggaaataaacccaacagtcatttcctatagagttgtgcacagaacaggccagataattattggagctatgatatatttttcattacaccatttggcctgggattttgtggcttggtagagatagttataacaatagataaaagtaagatcctcttcctcttttccttgctaaagatatgttaacatctttgtctagctgttgtttcttggaaaattaaagtcaatttaaatgacggcaaggttttactcagtgatgatgaagtaagatggagagagaaaatggaaactttaacctcctggttaaattctatttaaccaggacgccgattcgggctacaatgcgtggctttcgtatgaattgcagccggcggcggtaagttaaattctattaaatcaataggatattagttccaggcatattttataaaaacagaatccaaaaccttagagcattgttgtggctaaattattgtgtttatgcacatacacacactcacatacaaaatcccacacatattgactgaacactttcttttgaatataaatatcttatctacatctcaagtcacattgagggaaatttattaatatgatgtgcttattcaaaatctgatatatcagttaccaatatttttcaccttcaccgattttattcttatgtgattgttatgtttccttttggagtcaatggctgttgtgtgaggaggtcttgaaaaatattacaggaagaggacagtaccacaaaaacctacatgactatgcagaactaccgatcaattgtcccaaaacgagtgtcgaatattctttgtcttaaagttctgcatggaattcttacacatggaaaaataaatttgtggcaaaatgaaactcatcaaccaattgtcagctaatataaaatgttgagcagaatgcagtgatttgctgtttctgggaaggtaaacatttaatcttcaattacatatttgcagtgaaaatgtcaggaaatgcaaggggcaaaaaaatactacatcaatggaaaatatgaagactgagtcatacttacacttacacgttcatgcgcatggtgtcgctcttcactgagaacgtttccgcgaagaaagccgccgtttctttcttcctgcagaaaatatagcagaaagcggaatacctcttgcgaatccttccgcactaggaagccataaaaattgggccttgagagacagtttgaggtaaggcgttgtatatattgcagatagctctgaggtttttggagtgtaccatgctgtcttcctggcaaggaggcccaagaccgcggcaactactgctctggcttctgatcctcgcagcctgggagacgggtagtggccagctccactactccgtccccgaggaagcaaaacacggcaccttcgtgggccgcatcgctcaggacctggggctggagctggcggagctggtgccgcgcctgttccgggtggcgtccaaaagacacggggaccttctggaggtaaatctgcagaatggcattttgtttgtgaattctcggatcgaccgcgaggagctgtgtgggcggagcgcggagtgcagcatccacctggaggtgatcgtggacaggcctctgcaggttttccatgtggaggtgaaggtgagggacattaacgacaacccgcccatattccctgaaagcaagaaacgaataatcattgcagaatctagacctccggaaactcgatttccactagatggcgcatccgatgcagatattggagtaaactcggcattgacctaccgactggatcccaacgattatttcactttggacgcacaaaacagtcttgagcaaatgtcttcattatcacttgtactgaggaaaacactggacagagaggaaattcaggaacatagtttattactgacagccagtgatggaggtaaacccgagctgactggcacagttcagctgctcatcacgattctggacgtgaatgacaacgccccggaattttaccaatccgtttataaagtgacggtgttagagaacgccttcaatggaacattagtgatcaagctaaatgccacagatcctgatgatggtacaaatggagatatagtttactcatttagaaggcctgtatggcctgcagtggtatatgcatttaccataaatccgaacaatggagaaattaggacaaaaggcaaactagatttcgaagaaaagaaattatatgaaatatccgtggaggcagttgacaaaggaaatattccaatggcgggtcattgtacccttttggtggaagtactagatgtaaatgataacgccccagaggttaccatcacttctttgtcactccccatcagagaagacactcagcctagcgccattattgccctaatcagtgtgtccgatcgtgactctggctcaaatggacaggtcacctgcaccttgacgccgcatgtccccttcaagctggtgtccacctacaagaactactactcattagtgctggacagcgccctggaccgcgagagcgtatcagcctatgaactggtggtgaccgcgcgggacgggggctcgccttcgctgtgggccacggccagcgtgtcggtgggggtggccgacgtgaacgacaacgcgccggcgttcgcgcagcccgagtacacggtgttcgtgaaggaaaacaatccgccgggctgccacatcttcacggtgtctgctcaggacgcggacgcacaggagaacgcgctggtctcctactcgctggtggagcggcgggtgggcgagcgtgcgctgtcgagctacgtgtcggtgcacgcggagagcggcaaggtgtacgcgctgcagccgttggaccacgaggagctggagctgttgcagttccaggtgagcgcgcgcgactctggcgtgccgcctctgggcagcaacgtgacgctgcaggtgttcgtgctggacgagaacgacaacgctccggcgctgctgacgcccggggctggcagcgcgggaggcacagtgagcgagctgatgccgcggtcggtgggtgcaggccacgtggtggcgaaggtgcgcgcggtggacgccgattcgggctacaatgcgtggctttcgtatgaattgcagctggcggcggtcggcgcgcgcatcccgttccgcgtggggctgtacactggcgagatcagcacgacgcgccctctggacgaggtggacgcgccgcaccaccgccttctggtgctggtgaaggaccacggtgagcccgcgctgacggccacggcaacggtgctgttgtcgctggtggagagcggccaagcgccacaggcttcgtcgagggcgtcggcaggcgctgtgggtccagaagcggcgctggtggatgtcaatgtttacttgatcattgccatctgcgcggtgtccagcctgttggtgctcacgttgctgctgtatactgcgctgcggtgctcggcaccgcccaccgagggcgcgtgcgcgccgggcaagcccactctagtgtgctccagcgcggcagggagttggtcgtactcgcagcagaggcggccgagggtgtgctctggggagggcccgcataagacggacctcatggccttcagtcccagccttcctccttgtctgggttctgcagagggaacaggccagagggaggaggactcagaatgcttgaaagaggtaagcttatattttaaaaaattgtcttagtaaacactttagccttccttgcagttgtttgtttaagacatctttcctgccaatttcaaattattctttactttaattttaattttgctagttgttatcgaatttaacaactctgctgtggacattatgtgttggattatccttcagagtgaaatcttaactcacaaaccataatgaaatgtgcaaaacaagaatattttgtttctgttgtattcttaatagttctaagtatttatcttgcaattgagcatttacaaaaaattcctcacgttgtgagaacttaaacatttagaaaatgtttgttttaatgaggctaatcgtaatcttaaatttaaaaaatttttagtttaatgtatacatatacccacaagatattattttaaagagccccataacttttcacataaatgctttttttaagtgcacttttctttctttctttttttaaactgttttgattgtctctacttttttgtcctctaggcacatcagtgttcccctctcatatatcccatgaaaaatatcttgtgattctgctttcaattttttatttgcattcagataattactcatacatatatatatacatatatagagagagacctggtaggctttttgttattatttcttttccaaagtttgaagggatttccaaaaggtactggtgactgaaagtaccttttggcagtccctgcaaatctaatggttttaatagctgtgtagtattccacagtgtaagtgtgcaattatatattatttacctaatgatgggcaatcactttgtgtcaagtgttctgttatcttcatgaaccatgctgtgctatcatttcatatatttcccaaaatattggtgttatttctacgaaattgattgtcagatgtggaattgatgcatcaaagatattaataattttaattataaaatatgtcactggattgccttccaagtattttggaaccaaccagttatgagcactctttctatctcaagaagcaatagtggttttactttctgctaatgtgatctctgtgaaatgatatttcactgttactttaattttaaattcctgtatagtattagtgaatttgagcatattgtcatatgtattttgttgatttgtatttgatcttctttgatttatccattaagttatttgcctacttttctattgaaaaaaaatttttagtttcagtttggaaaagttctctgtaccttatagatattaactgtttatctattttttgacatttttaattaaaatttttattttgagataattatagattcgcatgtggttgaaagaaatagtaaagggagatgctatgtattcttcactaagttttccccaatagtaacatcttacaaaagcgtagggccataccacaacctggatattgacattgatacagtaaagaagtaacatagttccgtaacaaccagattcttgatatcacctttttatagccacatctgcttccctgcctaatgctggcaagcagtaatctgttctccatttctctaattttgttacttttacttcagaaataaataaaagtatctctatttatagataaaattttttaaaattatttttatatttatttattttttattacactttaagttctgggatacatgtgcagaacgtgcaggtttgttacataggtgtacatgccatggtgtgcttatctattatctgcatcacaaatatgttttcctcctatattatttctattcatttgtttgtactaattttgtcatatataaatgtttttaaaatgtatgaattaaaatatatctttttccttttatggattttaaggtctgcatattcagttagaaaggtcttcccagctgggcacggtggctcacgcctgtaatcccagcactttgggaggccaaggtgggcggatcaggagatcaggagtccgagaccagcctggccaacatggtgaaaccctgtctctactaaaaatacaaaaattagcgaggcatggtggcacgcgcctgtaatcccagctacttgggaggctgaagcaagagaattgcttgaacccgggaggtggaggttgcagtgagatgagatcatgctactgtactccagctctgggtgacagagcaagacttcgtcttgaaaaaaaaaaaaaaaaaaaagaaaggtcttcccaactcctatattgaacattcattaattaaatgcatttaataaatacttattgagtgttctctatgtgccaggcatgttctacacattagacatttagcaacgaaatttattattttgtaaatccaaatttccagttggtatcactttcctactgcctgaaaaatttctttaatattttttatagtgcatatgttctggcaacaaattcactcagcttttgtctgagaaatatctttatctctttttttttttttgagacggagtctcactctgtcgcccaggctggagtacagtggcgtgatctcggctcactgcaagctccacctcccgggttcacgccattctcctgcctcagcctcccgagtagctgagactaccggcgcccgccaccacgccctgctaattttttgtatttttagtagagatggggtttcatcttgttagccaggatagtctcgaactcctgacctcgtgatccacctggctcggcctcccaaagtgctgggattacaggtgtgagccaccgcgcccggctctttatctcatttttatttttgaaaaagtattttcactgggcatagttgacagttttttaaaagatataattcagttgtcttctggcttgcatagtttctaataagatgtttgcttttttatatatgagtcttcctctccccacccctcatggttactgttaaaacttttctttttatcctgacttttgcagattgattgtgatgtgctttagtatggttttctttatgttagtctgttggggtttgttgatattcttggatctgtggatttatcattttcatcaaattcaggaaaaaatcaaccatacttcttctaatagttttttctttccttccatcctttctgagactccagtaacacatatgttacaatgacacaggtcattgaagcgttctttatttttgtccatttctttctctgtgcctcattttgaatatcttttattgacatattttccaagttcactaatttttccttttgtagtatcatatctgttaatcctaaacagtgtattcttcatttcagagaccatatttatttcttatctgtataagattctttttgtctcttttaaaatttattttacatgtctccaccgaatagtcatctttttatctatatgtttgagcatattagtacatgtataatagatgttttaactttcttgtctgctaatttcaacatttttgtccttagtttgcttcttttaatctatcttcttctatggatatattttcttgctgttttgcatgactggtaatctctaataagatgctagacattgtgaattttacattgtcggatgctggattttgtgtgtgtgtgcatgtgtgtgcgtgttcctttaaagcagtagttcttgataagaaacagttttgtcccctctaccccctacccaggagataatttggcaatgcctggatacatttttggttattacaactagggaattgctactggcatctaataatggagctctgagatgctgctaaacaccatccaattgctgccaaacatcctaccgtgcacaggacagccgcccaacaataaagaattagctcaaaatgtcagtagttccactgttgagaaactctgctttaaagagtcttggacttagttctgacgtgaagttaagttgctcagtaccaatttattcctttcaaggcttcattttaagatttgttagtacacattcagagcagcttttagtgtagcactaattcggccttctattacagcaatactttcctgaggacaccacctaatgccctgtgcattaagaggtctctcttctctgattggtaggaatgtgaaatatttccagccctttgtgagctctaggaattattctacccacttttttttttaattttgaagggatagcctgatctggggaggttgatcagtgatctgtgatctgtgatcacatcactccactgcagcctggtgacagagtgagaccatgtctcaacataaaaattaaaacattagaattgaggtttaatgttatcaaatattttatctgcatcttttgagggaggtataaattttttctttggcaatgttaatgtgttgaatttatgatttatgattttcttatggcaaaccaacctctacttccttggataaccgtaatttgattataatttataatccttttaatatactacttattttgttaaattttcaaaacaattttttcatctttattccaggtgatactgatatgtcctagtttttcttcctaatttcttctttgttaagtattcaagttataaataagaatctagcataacttgaatacttaacaaagaagaatagtctttgaaaacttccagaaaattttctgtttcctgtaaaagtttgtataatctttgaattacttcttatttgattggagaactcactgttgaagttatctgtatcaggattttgattggtgggaatatttctgattactgactcaattttaatagtataaggaccattcagagtttaatttactcgagtcagttacgtagataatattttttcaggtattttcctgtttaatctaaattttcagttatatgctcatactttctacagaatctatagtgatatttccctttccattcttgatattatttttgcttcctgtctaatttacttttcttcagaattctgctttctgatttttgtttttgctttgaaatatttttatattaattatactgattcatttctcttcttttcatttgtgtttgcaggagatgtcctcttcccagccttttattttaaaccttttagtattatgggcatattccacaagttctttgctactgtctcactgagtagcagagtctaatttttctttccttgaactttgactggtcttaatattggaagtaacattctgggatttatgaagtcaggtcataagaagtcttacagtatgctttggtctctgagaatatttgttttgggggaagcctgccaccatgtaagaattctgactaccttgagattgtcatactgtaaagaagctcaagctggacttgtgagaagccaaatggatagaaaaattactatccagtctccagttgtcttagctttccaagcttaggtgccagaaaaatgtagaaggcttcaggtgactgtagtgtgttggagctggctcttttactggcttatgagaactgataatgcaaatttattcccaactctggattcaatgatgtcactttggtagcttgaaattggccatggtaggagtatttctgccacagaaataggcaaatgctacaaaacagagttttttgtttttcttttttcccagagacctagttgttaagcatttaccagtacactactgcacctgattgcaagcaagaaccactcagttgagtcagaaccaggagaggtaatattaagttgttttaagatattaggtagttgggatggtttactatatagcaatggataacctgaacaagtactctttcttagataatctataaattttaacttgaatatttatttagtttatatttacaatacctagtgatatctttaggcacaaatatttcaattttttgtgcgttatttttgtctcaccatttttatgtctctatttccttcctttgttgatcttcttttgaaatgactgagtactttttattgttccatttccttctgtattatttggaagcccttttccgaatagctagtgcttaccctagaaaattaagcatgtatccttgatatatcaaaatcaaaagttaactgaaacccttcctccttctgggaaatgcagggaccttacatttttaaaatctttttaatcccttttgacttatatactatttctgtcatgctttaaaaatattttaaaaccccataagatattagtattattttatacaatcaacattgttttaaatgtacttacatatttaccagttttgtttctcttccttacttcttgcccctctgacctttcatcagggattattgtctttccatgttagaataatttgagagtttcctttagtccaaagatgctggtgaggaatgatttcaggttttgtttttctgaaaatgtctttatttcatcataattattgaaaagcattttttctgagggtataatcttaggtgtgacccccacagcacatagtaaatattattccagtgtctactggtttccattgttgctgtcaagaatttagctgtcaatctaaatgtcattcctttaaaggtattctgtttattttcctttggctgcttttcagattttctgtgtgtctgatattttgcagttttaccatgctgtgtctttataatcatcctgttctggattcagtaggattttttttaatttttaatttttccgtaagttattgggggtacaggtggtatttgattacatgagtaagttctttggtggtgatttgtgagattttggtgcatccatcacctgagcagtatacattgcaccatatttgcaatcttttatccctcgccaccccccactcttgcccccaagtccccaacgtccattgtataggatttttgaatttgtgaattaatgcctttacatcactttgagcatatcctcagctataatgttctccaatgttgcttctgttccattgtatttctatagtattattttagtactctaattaaacatattttaatcttattactctatcccatctatttctaccttttattttaacaccttttgctctttgggctttattgtggatagttcacccaccttaaagtttaataattctctcttcttgctgttgtctgaatttgtacccccaaattcatgtgttgaaaattcaatcccttatacaacagtgttgggaggtggggaatttcaggaaatgtttagattatgagggatctgccctcatgaataaattaacggcactgtaaaaggacttgatggaaggagcctgtccctctcttatgcttttggctctgtcatgtgacgatgcagcaagaagatcttcaccagatgctggtgccttgatcttggacttcccctaggctccagaattgtgagaagtaaatttccgttctcataaattactcagtctgtggcattctgttatagcagcacaaatggtctaagatacttttatttattctttttcaaatttattgttactttgtataatttctagtttcctctcgaaactttcaagcttggcatttatatctggaacacaataagctcatggttttagcgtctatttctgatatgtccagtaactgggatcctcatgggtctattcctgtggtgtgttttaaaattgtatctttatggtgttttgtctccacataaacctggttatctttgattttgtgctgaaagttgtattaaacacttcttcctggaaataatttggggcttataacattttctttctccagaatggattttaattgacttttgccaggcatcttggggcactagcaatcatgggtaatcttaatctatttcaagcttcaggtattctagataaaacctcattatctaaaatttacatgtattctttaagtacggttattcagtttcctagccaaacatgagagattgtttaagaagttccaccatgactggtagactcaggattctgacttttgtttctctagtccttggagactgtcaaaagtatatctcagtattcattcacctatttttttccttttatttccagttggtacataataattgtacatatttataggatacagagtgacattttgatacatatatacaatgtataataataaaatcagggtaattagcatattcataatctcaaacatttaccatttttgcatggtgaacatttaaaatccactcttctagcttcttgaaaatatgtaagaaattatagttaaccatatttatcctacagtgctacagtgctgcaaaacaccacaacccattcctcctgtgtagctataatttcgtatccattaaccaacctttccccatcctccttttccttcacccttcccagcctctgataagcacaatactacttccatgagctcaataaaattttgtagctgccgtataagtgagaacatgtatttatttttctgtgcctgacttatttcacttaacatatgccctccaggctcagccatactgccatgaataacaggatttcattcttttttatggctggataatattccgttgtgcatatacaccacattttctttatccactcatctgttgatggatattgaggttgattccacatagtagctattgtgaatagtgctgcagtaagtatgggaggtgcaggtatcactttgacatactggtttccttttctttggataaatgcccaatagtggaattgctggatgatatggtagttctatttgtagttttttgagggactcccatactgttttccttagtggcagtgctaatttacatgcccaccaacagcatttatgggacagtggctcatgcctgtaatcccagcacttagggaggcagaggcaggaagatcgcttgaagccaggagttcaagaccagcctgggcaacatagcaagaccctgttcttcacaaaaaagaaaaaaaaagcagttgtagaactcctttaagtatttcttgtaggacttatctagttgtagtgtacttcctcagtttttgcttgtttgggaaatactttatttctccttcatttctgaagtatagctctgcttggtatagtatttttggctgatagttttaaaaaatttcagcactttggatatatcatctcattctatcctagcctgtaaagcttctgctgagaaatctgctgttagtctgatgggaattttcttataggtgacttgtcacttttcttttaccgtttttagaattccctccttgtcttgagtctggtaccgtagactactcagccatcctgatgccctacctcttgtatagaaacaacccagatccaaagtggccagaaagttactttaccttctgaatttgtggtctttttcagaatctctacctgttaattctgcatgactttattagtcattagatacttttataattttaaaatatctccaattgtatggttggttcaaattaccagttctgcatactggtaatgtaagtcctctgttgaattgatttttaaatacatttattttattccagtatcttctagctcctggtgttgcagatgagaagtttcaaataacttgaaataattcccttctatgtaattatccctgattttgactttctttccatagttatatattttttctatgctattatattctcattttaaagatgttgaatgacaatgtaattttcttttctttacaagtggtagcttatttacaagtatttttgaagtttattttcctggaaagttttcttaaattatagattttagtatttcttctgttttattacttcagatttcttcttcaatggctccaattatatttgtattagatattctttgcttttcttttgtagctaacactcctaaatcctacctagctcttttttaaaaaatattttactttttattcttgttttcatcttatagttttctttaggcattatccatagtgtttatatgctgttatgtgccttctggtttagtgtttacttctgaaaaaattattttccttttttttaatattttactgagttttctcatctctcttttcaaagcttttcttctccaatcatatcattactgagtctctctaattctgatttgtgtattcttgcatagcttttcattattttctaaaaatgtttaagttgttttcaaatattacgtagcaatttgtggaattttttttcttgtgtgtatttatttcctttagtgtaattatttgtcctctcctttaaaaataattttatatcagatttgcccataatccttttcttatgctcatttttatatgaaaagtgctcccccataattttagaagaaacagaccaggataattttcctatctttgttgctctatagatttctattcagctattgtcatgaaatgataaaaatataattttttaatgtcttactttgtgacatcctttaccctttttacttggacctttttcctttgtttaattgtcccccacccacaccattctgcttcatatggactcaattcctatcagttcctcctcagtataggggtttttgctacaagaagacatttgttagttgacaagttcatagggctaagacaggtttagcacaatccaatctatttgtagtcccttctgctaagttttgaatttgcttttatttctaatattttactgagttttctcatctctcttttcaaagctttcttttttttcttactcagggataattgaattaggaccttcgatttccccccttccacccatgactattgttctcaaattgttttactatgctttccagtgagtacttattggcactttttggagttcttcaattctcaacaccatcaaaagccccataaccttcttttgcttcctcctgagactcttttcatgtgcttattggtcatttctttatcctcttcggagaaatacctattcagaacttttgcccaatttttaattggtttattcgtttttcaattgttgagttgtaagagttctttatatattctagatgcaattactttattagatatataatttgcaaagattttctcattgagggtgttgtcttttcacattcttttttagctcccacttataagtgagaacatgtagtatttggttttctgtttctatattaattcacttgggataatggcctgcacctccattcaatgggctgcaaagggcatgatctttttctttctttatggctgcatagtattcaatgacgtatatgtacaatactgtattgtattgtattgtatttttttcagacaaagtctcactcttgtaccccaggctggagtgcaatggcgcgatctcggctcactgcaacctccgcgtcccgggctcaacaattatcctgcctcagcctcccgagtagctgggattacaggtgcctgtcaccaggcctagctaatttttgtattttaagtagagacagggtttctccatgttggccaggctggtctcgaactcctgacctcaggtgatccgcctgcctcggcctcccaacatgctgggattacaggcgtgagccactgtgcctggccaatgtactgcattttatttatccagtgcaccattgatgggcatttaggattattctctgtctttgctattgtgaatagtgccatgatgaacatacacatacatgtgtctttatagtagaatgacttatattcctttggttatgtacacagttatgggatttgctggcttgaatggtaagttctttgagaaatcttcaaactgctttccacagtggctaaactaatttatattcccgccagcagtgtataagcattcccttttctctgcaacctcaccagcatctgttatttttgactttttagtaatagccattctgactggtgtgactgcaacctccacctcctgggttcaagcggttctcctgcctcagcctcctgagtagctgggactgtgcaggcacacaccacaaagcccagctatttttcttttttttttttgtattttaagtagagatggggttttgacgtgttggccaggctggtctcgaactcctggtcttaagtgatccacctgccttggcctcccaaagtgctagtattacaggcatgagtcactgtgcccggccctttgcccattttttgatgaggttgtttgttttttgcttgttaatttgtttaagttccttatagattctggatattagacctttgttggatgcatagtttgctgatattttctcccatcctgtaggttgtctgtttactctgttcatagttgtttttattttttaattttatgggtacataataagtgtacatatttatggggtatatgagacattttgatacaagcatgcaatgcacaataatcacatcatggaaaatggaatggccattcccttaaacatttattctttgcacaaacaaaccagttatgctcttttagttatttttaaatatacaactaaattatttagaccatagtcaccctattctgctgtcaaatactatgtcttattcattttttctattttttatcctcattaaaaatctccactttctgtccacaccccactaaactttctagcctttgttaaccattcttctactgtctatctccatgggttcaaaaaatatatttttttattatactttaagttttagggtacatgtgcacaatgtgcaggttagttacatatgtatacatgtgccatgctggtgtgctgcacccattaactcgtcatttagcattaggtatatctcctaaagctatccctcccccctccccccaccccacaactgtccccagagtgtgatgttcccttccccttcctgtgtccatgtgttctcattgttcaattcccatctatgagtgagaacatgcagtgtttggttttttgtccttgcgatagtttactgagaatgatgatttccaatttcaaccatgtccctacaaaggacatgaactcatcattttttatggctgcatagtcttccatggtgtatatgtgccacattttcttaatccagtctgtcattgttggacatttgggttggttccaagtctttactattgtgtatagtgccacaataaacatacgtgtgcatgtgtctttatagcagcatgatttatagtcctttgggcatatacccagtaatgggatggctgggtcaaatagtatttctagttctagatccctgaggaatcgccacactgacttccacaatggttgaactagtttagagtcccaccaacagtgtaaaagtgttcctatttctccacatcctctccagcacctgttgtttcctgactttttaatgattgccattctaactggtgtgagatggtatctcattgtggttttgatttgcgtttctctgatggccagtgatgattagcattttttcatgtgtcttttggctgcataaatgtcttcttttgagaagtgtctgttcatatcctttgcccactttttgatggggttgtttgtttttttcttgtaaatttgtttgagttcattgtagattctggatattagccctttgtcagatgagtaggttgcgaaaattttctcccattttgtaggttgcctgttcacgctgatggtggtttcttttgctgtgcagaagctctttagtttaattagatcccatttgtcaattttggcttttgttgccattgcttttggtgttttagacatgaagtccttgcccatgcctaagttctgaatggtaatgcctaggttttcttctagggtttttatggttttgggtctaacgtttaagtctttaatccatcttgaattaatttttgtataaggtgtaaggaagggatccagtttcagctttctacatacggctagccagttttcccagcaccatttattaaatagggaatcctttccccattgcttgtttttctcaggtttgtcaaagatcagatagttgtagatatgcggcgttatttctgagggctctgttctgttccatttatctatgtctctgttttggtaccagtgccatgctgttttggttactgtagccttgtagtatagtttgaagtcaggtagcataatgcctccagctttgttcttttggcttaggattgacttggtgttgcgggctgttttttggttccatatgaactttaaagtagttttttccaattctgtgaagaaagtcattggtagcttgatggggatggcattgaatctgtaaattaccttgggcagtatggccattttcacgatactgattcttcctacccatgagcatggaatgttcttccatttctttgtatcctcttttatttcattgagcagtggtttgtagttctccttgaagaggtccttcacgtcccttgtaagttggattcctaagtattttattctctttgaagcagttgtgaatgggagttcactcatgatttggctctctgtttgtctgttattggtgtataagaatgcttgtgatttttgtacattgattttgtatcctgagactttgctgaagttgcttatcagcttaaggagattttgggctgagataatggggttttctagatatacaatcatgtcttctgcaaacagggacaatttgacttcctcttttcctaattgaataccctttatttccttctcctgcctaattgccctggccagaacttccaacactatgttgaataggagtggtgagagagggcatccctgtcttgtggcagttttcaaagggaatacttccagtttttgcccattcagtatgatattggctgtgggtttgtcatagatagctcttattattttgagatatgtcccatcaatacctaatttattgagagtttttagcatgaagggttgttgaattttgtcaaaggtcttttctgcatctattgagataatcatgtggtttttgtctttggttctgtttatatgctggattacatttattgatttgcatatattgcatcccagggatgaagcccacttgatcatggtggataagctttttgatgtgctgctggattcggtttgccagtattttattgaggacttttgcatcaatgttcatcaaggatattggtctaaaattctcttatttggttgtgtctctgcccggctttggtatcaggatgatgctggcctcataaaatgagttagggaggattccctctttttctattgattggaatagtttcagaaggaatggtaccagttcctccttttacctctggtataattcggctgtgaatccaatattttgttttgtttttcctttttgagacaggtcttgctgtgtcacccaggctggagtgcagtggtattaacagaactcagtgcagccttgacatcctgggctcaagcaatcctcctgcctcagcctcctgaatagctgggaccacaggcatgtgctgccatgcccagctacttttttgattttttttgtagagatgaggtctcactttgttacccagtttggccttgaattcctgggctcaagtgatcctttaacctcagcctccaaaagtgctgcagttacaagcatgcgccaccatacctggccttgttttgatttttaggtaccacaaataagtaagaacatacgatatttgtctttctgtgcctggtttatgtcacttataatgacatccagtttcatccaggttgttgcaaatgactggatcttgttttttttatggctgaatagtactccattgtgtatatgtaccacactttcttttctgtttttttagacagtctcacttttgtcgcccaggctggagtaccgtggcgcaatcttggctcaccgcaacctctgcctcctgggttcaagcgattctcctgcctcagcctcccaagtagctgggattataggcacgtgccaccacggccggctaattttttatttttagtagacacggagtttctccatgttggtcagactggtctcaaattcccagcctcaggtgatctgcccacctcggctttccaaagtgctgggattacaggcgtgagccacggcaccggcccattttctttacccgttcatctgatgatggacatgtagattgcttccaaatcttggctattgtgaacactgctgcaatgaacaatgggagtgcagttatctcttcaatatactgatttccgttcttttggaaagaaaggaaatcctacctagcagtgggatttctggatcacttggtagctctatttttggctttttgaggaaactccaaactgttctccatagtgcttgtactaatttacattcccaccaacaatgtacaaagtttccctttttttcacctctccagcattttttattgcctgtcatttggataaaagccattttaactgtggtaagatgatatctcattgtagttttgatttgcatttctctgattatcagtgatgttgagtatcttttcctatacctgtttgctattagtatgtcttcttttgagaaacatctattcaactcttttgcccattttaaaattagattattagatttttttttctatagagttgtttgagctccttctacattctggttattcatcacttgttagatgggtagattgtaaatattttctctcaatctgtgggttgtctcttcactttgttgattgtttgcttttctgtgcagaaggtttttaagttgatgtgatcccatatatccatttttttcctttggttccctgtgattgtggggtattactcaagaaatttttgcccagactgatgttccggagagtttccccaatgttttcttgtagtcgttttatagtttgatgtcttagatttaagtctttaatccattttaattcaatatttgtatatggtgagagataggggtctagtttcattcctctgcatatggatatctagtttcccagcacagactgtcttttctcgagtttatgttcttggcaccttcatcgaaaatgagttcattatagatatgtggatttgttttttggttctctattctgttccattcatctatgtgtctgtttttatgccagtgccatgatgttttggttactatatctctatggtataatttgaagtcaggtaatgtgattcttccggttttgttctttttgctcaagatacctttaggtattatgggtattttgtagttctatatacattttcagattgtcttttctatttctgtgaagaatgtccatggtattttgacagggattgcattgaatttgtagattactttgggtagtatgaacatttttacaatattgattcttccagtccataaacatgcaatatctttccatttttttgtgtcctcttcaatttctttcatcagcattttatatttttcattgtggagatctttcacttctttggttaattcctaggtatatttagttttattcgtggctatcgtaaatgggattactttttaatttcattttcagattgttcactgttgggacatatagaaatactactaatttttgtatgttgattttgtatcctgcaactttactgaatttattgttttaatagttttttggagtctttagatttttttaaaactgagattatatcatctgcaaacaaggataatttgatttcttcctttctaatttggatgtcctttatgtcttctctctctctctctttcttttttttttttttttttgagatgaggacttgctttgttgcccaggctggtctcgaactcctgggctcaagcaatcctcctgcctcagcctcccaaagtgctgggattacaggtgtaactcacttcgcctggcctaggaagccctttatttctttctcttgtctaattgctctagctaagagtactatgttgaatactatgttgaataacagtggtgaaagtgggcatccttgtcatattctagatcctagagaaaaggctttgagtttttgcctgctcagtatgatactagctgtgagtctgtcatatatggtttttattatgttgaggtatgttccttctatacccagatttttgagggtttttaagatttcaatagttttgggaaacaggtcgttttcagttacatgggtaagttatttagtggtgatttctgagattttggtgcacctgtcacccaagcagtgtacaccgtacctaatatgtgtagtcttttatctttcactcccctcccacccttccctccaagtcccccaaatccattatatcattcttatgtctttgcattctcatagcttagctctcacttgtatgtgagaatatacaatatttggttttcgatttctgagttacttcacttagaaaaatggcgtccaggtccacccaagctgctgcaaaagctattattttatttagtttatggctgagtagtattgcatggtgtatatataccacattttctttatccacttgttggctgatgggcatttaggttggttccatatttttgcaattgtgaattgtgctgctatcaacatggcttgcacatgtgtctttttcatgtaatgacttcttttcctttgggtagatacctgatagtggcattgctggatcaaataatagctctacttctaaatctttaagaaatctccaaactgttttccatagtggttgtgctggtttacattcccaccaatagtataaaagagtgtccttttcaccacattcatgccaacatctattactttttgatttttaaattatagtaattcttgcaggagtgaggtagtgtctcattgtgcattaggaaatttagtatacaataaagacagcatttttattgaggaaaggatgcattttaaaaaacaagtttttcaaaaatatagggaggattgtggttacttctagaaacagtagtgcagtcaggaaaaattcagcacaatatgtatcagtggaattcatctgatcaaacttaaaatattattccttgcattatagttctgagcaggtaccatagataatagttctattgtgttgttcactttaaactagagcaagaaacttttctaataagtggaattgggagctgtctagctggtgttggcctgataaatgcttaatacacatgaatgtgcatgcatatgtatgcatataccatatacatatattataaatttaactgatataaaagatgtttggtaaatagtttaaaatagtaataaaatatacaattctccctattatcaattattacagaatgtttcccttgatttttgctgaacttttctatccataaactatctatggttgtaattgacaagtatagttctcacatgaatgtctgttggtattttcatttatcttaacaaataatatagagtaaaatgacaaagacattgaatcttgacctgtttgtcaatgatgtgacttccttgctgcattggataatacctcttaaatactggaaaattatttgttgatttttggtctattcacaatgtaacagctacaaatatgatacactttaaaaaataatggtataatttaactttttaatttttttatttcaatgggtttttggggaacagtatttggttacatgaataactactttagtggtcattgctgagattttggtgcacccatcacccgagcagtatacattgcacccagtttgtagtcttttattcctcacccccttcccaccctttccccctaagtccccaaagtccattgtattatacttatgcctttgcatcctcatagcttagctcccacttatgaatgagaacatgtggtgtttggttttccattcctgagtttcttcacttagaataatggtctccagttccatccaggttgctgagaatgccattatttcattcctttttatggctgagtagtattccatggtgtattatatatataatacatatattttatatatatgtatattacaatttctttatacacttgttgattggtggctatttggtctgattccaaatttttacaattgtgaattgtgctgctataaacttgtgtgttcaagtatctttttcatataatgacttttttttcctctgggtagacacccagtagtgggactgctggatcaaatagtagttttacttttagttctttaaggaatctccacactgttttccatagtggttgtactagtttacattcccaccagcagtgtaaaattgttcccttttcaccacattctggccaacatctattatttttttattatgaccatttttgcaagaataagatggtatcacattattgttttaatttgcattttcctgataattagtgatgttgagcatttttttatatgtttcatatcttcttctgagaattgtctgtttatgtccttagctcactttttgatgggatttgtttttcttactgatttgtttgacttccttgtaggttctggatattagtcctttgtctgatgcagaatttgtgactattttctcccactctgtgggttgtctgtttactttgctaattcttttctatgcagaagctttttagtttaattaggtcccatttatttatttttgttgtagttgcactttcttttgggttctcagtcatgaattgtttgcctaagccaatgtctagaagagtttttctgctgttatattttagaattttcatggtttcaggttttagatttaagtctttgatccatcttgagttgatttttgtgtaaggtgagagatgaggatccagtttcattcttccacatgaggcttggcagttatcccagtaccatttcttgaataaggtgtcctttccacactttgtgtttgtatgctttgttgaagatcagttggctgtaagtatttgactatatttctggttctctgttctgtttcataggtctgtgtgcctatttttataccagtaccatgctggtttgataactacagccttttagtataatttaaagtcaggtaatgtgatgccttcagatttcttctttttgttttgtattgccttggggatgtgggctcttttttggttccatatgaactttaggattgtgtttttctagtcatgtgaagaatgataatgatattttgctgggaattgcattgaatctatagattgcttttgacagtatggtcagtttcacagtattgattcctgtcatccattaacatggaacatattccatttgtttgtgtcatttatgatttccttcagcagtgttttgtagttttccttgtagagatctttcacctccttggttaagtatattccgaagtgtattagtcagggttctctagagggacagaattaataggctagatgtgtatataaaggggagtttattaaggagtattaactcacacaatcacaaggcccaacaataggccatctgcaagctgaggagcaaggaatccaatctgagtcccaaagctgaagaacttggaatccgatgttcaaggggaggaagatccagcatgggagaaagatgtaggctgggaggctaagccagtctaatctctccacgttcttctgtctgcttttattctggctgcactggcagctgattagatcgcacccacccagactgagagtaagtgtgtctttcccagtccactgacacaaatgttagtctcctttgataacaccctcacagacacacccaggaacaatactttgcatccttcaatccaatcaagttgacactcagtattaaccatcacaagtcctccccttgtcaacttgaacccatacacacctcctgaaattatagataatcttcaaattaagacaataataaggtcataattattcccaacatgatacaactatccttcatacaaccaagaatgcaccaattcccaacccaaatgctattacataaagttaacatttaaattttcatatgaagtcaataaatcttatgtcacatgataaacaagaaaggaaataaaatgaagatattttcttagtacaaatgtataaatgcacaaacatgtttttaacaaagaaggaggaaatactcacgacaattaaaatcctcatttctgcaactggttgtgtggttcatagctggtattgatgactaccttcctctactactcattctgtattccctttgccttcagcaagcacctcagcaggtagtggttttttcctggtgtagtgacccaaaccttcattcctgaaggatctgggccatttgtagtcctgcctggattgtgctgttgtagtttcccattgacacagggcatggtaatactaagagacaccctaagggatcttgtgtattccatgcatactcttccttacctccactgtggagtagtagactgatttcatcttgagagtctgggtcagtcaccccagccaacactgtaacttccttcttagattgttggtttaaaggtaggaggagcccaaaaagtgtcccggtgtcaatcttaatttccagtttaatggaatcgtggttgtgtcttctggtggcagcattcctccctctggaactaagacctctaggccagcagaacataatgtcacagggacagtaagcaaaaattttactagtgggtcactaggggtgatggtaagtggtgccacttccacttccaccccttgattcctggacctgtgaattccggctatgggagaaacagtaccatatattggatgctgattcagagcatacacaaccttctggagaattttgccccagccctgcaaagtattgtcacctagttgacattgtaattgtgacttcaaaaggccattccatcattctatcaatccagctgcttcaggatgatggggaacatgtaaagaccagtgaattccatatgcatgagcccgctgctgcacttctttagtcgtaaagtgagtgccttggtcaaaggcaatgctgtgtggaataccacgatggtggataaggcattctgtgagtccacagatggtaatcttggcagaagcaatgtgtgcaggataggcaaacccatatccagagtaagtgtctattccagtgaggacaaatcgctgccctttctatgatggaagaggtccaatataatcaacttgccaccaggtagctggctgatcaccctgaggaatggtgccatatcaagggctcagtgttggtctctgctgctggcaaattgggcactcagcagtggctgtagccaggtcagccttggtgagtggaagtccctgttgctgagcccatgtgtaacctccatccctgccaccatggccactttgttcatgggcccattgggtgatgacaggggtggctggggaaagaggctaagtggtgtccacagaacgagtcatcctatccacttgtttattaaaatcctcctctgctgaggccagccgttggtgagcactcacatgggatacaaatatcttcacagtttttgaccactcagagaggtccattcacataccttttccccaaatttctttgtcaccaattttccaatcatgcttcttccaagtccttaaccatccagccaaaccactggctacagcccattaatcagtatataattgcacatccggccatttctccttcatgaaaagtgcacaaccaggtgcactgattgaagttctgtccactgggaagatttcccttcactgctgtccttcaggtatgtcctaggaaggggctgtagtgctgcagctgtccactttcaggtggtggacatatcatgcagaaccatctgtgaaccagtccttagtcttctcttcctcatcaactgatcatagggaactccccatgaggccattgttgcaagctggggaagagaaggaagggcggcaggagtggagaccatgggaatttgagccactacctcatgtaacttacttgtgccttcaggacctgctcgagcccgatcacatatataccacttccatttgatgatggaatgctgctgtgcgcaccccactttatggctagatggatcagaaagcacccagttcatgataggcagttcaggttgcttggtgacttgatgacccatagtcaaatgttcagtttccaccaaagcccagtaataggccaagagctgtctctcaaaaggagagtagttagctgcagaagatggaagggccttgctccaaaatccttgaggtctccactgtgattcacttatgggggcctgccaaaggctccaaatagcatccctatctgccactgacacctcaagcaccattggatctgctgggtcatatggctcgagaaacagagcaacttgcacacagcctggacgtgttgtagagtcttctcctgttctgtactacattaaaaagtgagagccttttgggttactcgataaatgggctggagtaacatacccaaatgaggaatgtgttgcctccaaaatccaatagtcccaaataagcctctttcgtggttgtaggaggggccaaatgcagcaacttatccttcaccttagaaggaatatcttgataggccccactccactggacccctagaaattttactgaggtagaaggttcctgaattttagtcatttattttccatactctggcatgcaaatgtctcaccaataagcccagtgtgtttgctacttctcactcactgggtccaatcagcaaaatgtcatcaaggtaatgaaccagtgtgatatcttatggaagggaaaatcaatcaagttctctccaaacaagattatgacacaaagccggagagttgatatacccctgaggtaggatggtaaagatatattgctggccttgctgactgaaggcaaattgcttctggtgggccttatggacaggaatggagaaaaaggcatttgccaaatcaatggttgcataccaggtaccaagagatgtgttaatttgttcaagcaatgaaaccacatctagtacagcagctgcaattgcagttaccatttggttaaacttatgataatccactgtcattctccaagatccatctgtcttcttcacaggctaaataggagagctgaacggggatgtggtgggaatcacaacccctgcacattttgagtccttgatggtggcactaatctctgcaacccatccagagatgtgatatgttttttgatttactatttttctaggtagaggcagctctaattggtcttcctattttgtcttttccatcataatagccctcactctaccagtcagggagccaatgtgggggttctgctagctgctaagtatacctatgccaattatgcattctggcactggggaaatgaccacaggatgagtccagggacccactggacccactctaagtcagacttcagctaaaactccataagcccctactttaactggaggaccaccaggacgttttcggtcccctggagtcaacgtcagcttagagacactgttcagtagtccctgaaatggcaatcatttccctttccccaatcacagttactctggtaaaaagccgtaggtctccatggggaaggatgggagaaagactaacagcataaattgttgtcagtgtcatccttgtatccctgggataaatcccacttggtcataataagtgatcttttaacagcgtaaattgttgtcaaggggaaccagcctccccttcatttaagggattctaggtctgtaaactggtttaagtctggaaattgattgaggggaaattgatcctctgtttttataattcaaattagtcttttgtccacttgacctggaagttttctgcttatataaattaaataagaatgcaataggcttcctatcattttcacttctaggaacaccatgattaatcaacagatgccagagatctacatgagtcagactattgtgattgctgctttgcctctgctgtccattatggtagctatgcccaccttgcctttgacagttgactggcccctgccacctcgagatccaattattcccattgcatttaagttttgtagttgagtgactgtggttcctactgtaaaatctggcatacagagaagagcaatcacaaagctcttcaaggatgcaggtactcccctcacaaatctattttgcaaagtattagtcaaggatatattttctggatcctcccagctgggatgagtaggtctaaactgactaatccactccaccatcccaatctccctaaaccttttgatcccttcctctacattaaaccaagggagatcaggcatttccagcttgctcacagtgggccatcttttaatccatatttcagctaaccaagcacataaattatcagaacctttttaaactccccaagctgcaacattaaatgcagaatccctgcttagtgggcccaaatcaataaattcagcctgatccaatgccttggatctatgttccatccaccattatcccacacccttaatatccattcctatgcctgtcctccagatttttgcttatataaataagaaagctcaagcagttcttttcgagtgtagcacacctcctcatgggttatactctgaacctcacccctagggccctcctgggactttagtctagttataggtctagaagcaaacaggggtggtggggggtgggtcctgaggagaatcaacattatcttgcctggcaactgcctcaggggaagccatcactgttgcctcaggcagtgcagggtttttctcctcagacaaatgtggaaaggctgatggcagtgtgggttggggaggacatgttgccactactggggatgagaaagctgtttcttctggcaaaaaaagtttcatcagaatttataatctcagtgtccccagcttcatcagggtccttttacatatccccattccaagtttcaggatcccattcttttccaatcaatgccctcatttcaacagtagacacctggcaaggctgtgcatgcacctttcattgcaggtcagccactggtatgataagaacttgtgtccaatttcccgcaatttcagctctttctctacaggagataagactctcactcagggcaatcttagcaggtttgaggttcagtatctgcttctgaagctaggaattagaatccctaagttcatcattttctttcatcactttgtccagtgaacttaggaggaaccaaccaacttcattatgttccttagttccccacatatggtcaaaggtattacatatagagttactaaactccttgcctctcacgaaccgtgcatcaggagtgtcaaatgaatttattttgtgtaactctgtaaacagttcgtgccaaggactatcagtgttctccatactattagaagtacagtccttagcatttttgggtctaatcatattaagcagccttctccagaaaccccaaaaccaatgaaagaactccatccttaatagtctgttcttctggaaccactcctgggaccaaaatctgtattagtcagagctctctagaggacagaactaataggatagatgtatatataaaggggaggttactaaggagtattaactcacatgatcacaaggtcccacaataggccatctgcaagctgaggagcaagcaagccaatccaagtcccaaagctgaagaacttggagtccaatgttcaagggcaggaagcattcagcacaggagaaagatgtaggctgggaggctaagtcagtctaatctctccatgttcttctgcctgtttttattctggctgtgctggcagctgattagattgtgcccacccagattgagggtagatctgcctttcccagtccactgactcaaatgttaatctcctttgatgacaccctcacagatatacccaggaacaatactttgcctcctgtaatccagtcaagttgaccctcagtattaaccagtacactaagtatttttttttttttttgcagctgttgtaaaagggattgagttcttaatttgattctcagcttggttattattggtgtatagcagtgttgctgatttgtgtgcattgattttgtatcctggaactttactgaattcatttatcagatctaggagctttttggatgaatctttagggttttcagagtacatgatcatattgtcagcaaacagcaacagttttaacttcctcttttccaatttggatgccctttatttcttcctcttgtctgattactctggatgagactttcagtactatgttgaatagaagtggtgaaaatgggcatccttgacttattccaggtctcagggggaatgctttcaacttttctccattcaatatgatgttggctgtgggtctgtcatagatggcttttattactttgaggtatgtcccttctatgccaattttcttgagggtttttatcataaagggattttgaattttattaaatgctttttcagcatcaattgaaatgatatatggtttttggtcttcattctgttgatatgatgtatcatattgattgatttgtgtatgttgaatcatccttgtatccctgggataaatcccacttggtcttttaactgtattgttgaattcagtttgctagtattttgttgaggatttttgcatcaatattcatcagatatattggcctggagttttattttattttgatgtgtcattgtttggtatcaggataatactggcctcatagaatcagtttggaagttaacccctcctctactttttggaatagtttgagtaggattggtattagttcttctttaaatgtttggtagaatttggcagtgaagccaatgggtcccaggctttactttgctgggagactttttgttacaactttgatctaattacttgttattggtctgtttaggttttaatttcttcatagatcaaccttggtaagttgtatgtgtctaggaatttatccatttcctctagatttttaaatttattggcatatagtggctcatcatagccactaatgatcctttgaattcctgcagtatcagttgtaatgcctcctttttcagctccgattttatttacttgggtcttctctctttttttcttcattagtctgtttaaaactttgtcaattttatttatcttttcaaaagattgactttttgttttgttgatctcttgtattttcatcatttcaaatatatttctgctttgatctttattattttctctactaattttggattcagtttgctgctgcttttctagttctttaagatgtatagttaggttatttaaaatgaggttttcattcttttccaatgtaggcaattacagctacaaatttccctctaatagtactccttttgttgtatctcataggttttggcatgttgtgtttccattatcatttgtttgaatcaaattttcaatttccttttaaatttctttattgacccactggtcattcaggagcatattgtttaatttccatgtgttcatgtagtttccaaaattccccttttttatttctaattttacttcattgtggtcagagaagaatcttgatatgatatcatttttaaaaaaatattttaggacttgtattgtgactagcatatggtctatctttgagaatgatccacgtgctgagaagaatgtgtattctgcagctgttggatgaaatgctccataactatctattaggtcaatttgttctatagtgcagattaagtctgatgtttctttgttgagtttttgtctgtcagttctgtccaatacggaaagtggggtgttgaattctccacctattattgtattgtgatctctatctctcttttagctctaatactatttgctttttatatctgggtgcttcaatggtgggtgcatatatatttataattgttatatcctcttgctgaattgaccccattatcattgtacaaagaccttctttgtctctttttggagtttttgtcttgagatctattttatctgttataagtgtagttacccctgctcctgttttgtttccattagcaaggaatatcttttcccatgtctttattttccagtctatgtgtatcttcataggtgaagtgtttcttgtgggcaacagatcattgggtcatgttttttcatccattcagccactttatttctttttattggagagtttagtccatttacattcaataatttcatttaagtaggaacttcctcctgccattttgtaatttgttttctcgtggtttcatggtcatctctcccttctttccatcttctttttcatgaaaataattttctctggtggtatgatttaatttcttgttttttattttttgtgtatccattgtatgtttttccatttgaggttacatgaggtttatgacttatcttatgacccattattttaaactgatggcaacttaacagactgcataaacaaaaaacaaacacacaaaaggaagactaataaaagttctacactttaactgtatcctcctgcttttaactttgtgttgtttctctgtgtcttattgtactatgttgtgaaaagttgtcttttttttttttttttttctgagtcagagtcttgctctgctaccaggctggagtgcagtggcctgatcttggctcactgcaacttctgcctcctgggttcaagcgattctcctgccttagcctactgagtagctgggactatgggcacgcaccaccacaacacccacctaatttttatatttttagtagagacggggtttcaccatgttggccaggatagtctcgatctcttgacctagtgatccgcccatcttggcctcccaaagtgctgggattacaggcatgagccaccatgcctggccaggttgttattatttttgaccagttcatcatttactctttctacttaagataagtttacataccacaattacagtgttataatattctgtgtttttctgtatgcctattcttaccagtaagtgtctcggcattgaagagctaggtatttcttatagtctttgcagtctgggcttgtttatccctgtccttcttgagaaggttttccagaaggtttttatttgaaggagcttgggcctcaatcccaataatactgtggtttttgcagactagtagaggtaccatcttggaggtcttgaataagatccagaatgattatctggattgccaggcaaaagcacttgttcttttcccttactttctgtcaaacagtctctttctgtctctctctctctctctctctctctctctcaaggtgctgggccatcttgaactaggggtatggtgatgcaagcactcctgtggcccccactttggattgtgctgggtcagacctatagccagcacagccctgggtcttgtccaaggcctgctgtaaccactacctgactaccacctatgttcactcaaggccctagggctctaagatcagcagggggtgacaccagccaagtttgcatccttccctttagggtagcaagttccccctggccctgggcaggcccagagatgctacttgggagtcagggattggagtcaaaatacttagaaatttgcctgatattttatttgactacggctaagctggcactcaaaccacaagacaaagtctttcccattcttccctcccctttccacaggcagaggtgcctctccctgtggccagtactaccactggtccacagggaatctgcctggccactgctgatgttcacttaaagcttaagggctgttcagttgtgttgtggtgaatgctgccaggcctgggactcttcaaggaagtgggcacccctctgccctggggaagatccaaatatgctttccaggagccaaagcctggacttggggaccccaagagcatgcttgttgctctactccacgtggccaaactggtaccaaaggtgcaagacaaagtcccctttactttttcctctgtttctgtcaaacagaaggagtctttcactgtagccaccacaactaggaatgtgctggatcacacctgaagtcagcacatctcagaacctaaggcccacagtatactacctggatatcactgctggttatttggtgcccaagggctctttagtcagcaggtgattaatcttgccaagactgggtccttcccaccaaggcaatgggttttctatttgtccagggtgtgtctagaaatgtcatccatgagctagggcctggaatgcgggcctcatgactctactcaatgccctatcctactgtggctgagctggtatccaagatgcaagacaaagtcctctttactcttttctctcctctccttaagcagaaggaaggagtgacttttgttgctgcaagcttcactgcctgggattaggggaggggtggcacaagcactcccttagctgccccagctgatgacttcctaggtcatgtgccacccctatccctctggttctgagcccagcccagcactaggagttacctaggaattgcaatccttgtgtcctagactgtctttcaagtttacctagaacctcagagcacttaagcatatagtggtgaggcttgctgagttctgactgctgggatgagtgattcgcctctggccaggcctgttccaaaatctcccttcatgtgcagctgctggctgagtccagcacagtgttgttccctgctacgacagcaccgagtttaatgtaaagttccccagttgctgtgctttacttcctccaagtgcgcagactccccacgttgctcagctgctgctgggggatatgggaggggtgatggtggtgatcccagagtgtctctccaaccctcttcaatgcctcttttagtgatacgttgttaaatctaggtactacgattgctcacctgatgtttggtttttgtaatgacgcttttccgtgtgcagatagttgttacaatttggtgttcatgtggcgggggaggggggggatggtgtaggcttctgttccactatcttgctccacctcaatagtctgatgtgcagaagctctttagtttaattaggccccatttgccaatttttgtttttgctgcaagagcgtttggcatctttgtcatgaaatctttgccagggcctatgcccagaatgatattttctaggttttattctacggtttgtatagttttaggttttacatttaactctttaatccatctcaggctgatttttgttcatgctgaaaggaaggggtccagttttcagtcttctgcatatggttagctagttatcccagcaatattgagtaggaagtcctttctccattgcttgtttttgttgaagatcagataattgtaggtgtgcagctttatttctgggttctctaacctgtcccattggtctatgtgtctgtttttgtattagtaccatgttgttttggttactgtagccttgcagtatagttgaagttgggtagtgtgatgtccttcttgttctttttgcttaggattgctttgactatttgggctcttttttttttccatatgaatgttaggatagtttgtttttctaattctatgaaaaataatattggtagtttgataggaacatcattgaatctgtgaattgctttggacagtatggttatcttaacaatgttgtttcttcctacccatgagcgtggaaggtctttccatttgttttatcatctctgatttctttcagtagtgttttataattctttttatagagatctttcacatccttgattagccatattcctaggtattttctttttgtgtatgtctattgtaaatggcattgtgttcttgatttggccctcagcttggatgttgttggtgtacagaaatgctgatttttgtacattgattttgtatgctgaaactttgctggaggttttatcagatgtaggagctttttggcagagaatatagggttttctaggtataaaattatattgtctgctaagagagataggttgacttcctctctgcctatttggatgccttttatttctttctcttgcctgatttctctggccaggacttccagtaggatgttgaataggagtggtgacagtgggcatccttgtcttattccaagtctcaaggggaatgctttggatggtaccaatccttttaaacttattgaggattgttttagataatgttccatgtgcaattgagaagaatgtatattatgctgctattggctatatgttctatagatgttgctatgatatgaatgtttgtgttccccaaattcataaattgaaacctaattctcatgttgatggtatgaagaggtgagacctttcaaacataattaagtcatgagggcagagccctcatgaatgggattggtgcccttataaaagaggcccagagaggtgccttgcctctttcaccatgtgaggacacagcaaaaatgtgacatccatgaaccaaaaagtggccccctccccagacactaaatctgctggtgcctgaatcatgaactttcaagcctctagaacagtgaaaaataaatctctcttgtttattaactacacagcatatggcattttgttataatatcctgaacagactaagacagatatcgtttaggttagttggtttttagtgttgttcacatctttcatttcctagtgatcttctgcctagttgttgtccattattggaagtggagtattaaagtctccagttatgactattgaattgtctatttctcccttcatttctgccagtttttgcttcatgtgttttggggctctattattagatgcaagtatgtttttagttgctatatcttcctgattggtccttttgtcattataaaatgtccttcttgatttctagtaacactttttgtcttgtctgttttgtctgatattagtgtagtcactccagctatcttgtggttgctgtttgtacaatatatgttttcccattcttttactttcaatctgtttgtatctttgaatctaaaagtgtctcctgcagacaacacatagttggatgttgttttcctaaaaactctagactgacaattctgccttttgattgggttctttaatgtattcacatgatgttactattgatatatttggatttatgtttgttattttactcctttttctatatgttttaattctctttttttcctatacttttcatttactgatttatattaagtgaatattttagaatgtaacatggtaatttttaaaataaattttaaactgtatcttttgagttattttcacagtagtttctctagagtttaccatatatattttagcttattggtatctgcttcagatttatattaacttaattctagtgagatataaatatgttacttctagatagctttatttctcttctgccttttgtattactgttacacatattacatcttgtggtggattgaattgtgggcctcaaaaatatatgtccacatagtaacctttggaacctgtgacctcatttggaaataagtctttgaagacataattatattagagatttggggatgaaattaccctaaattttcaggtgggggctaattccagtgaaaagtttgttttgttttttaaataagagatagaagatggaaaacagacacagaggaaaaggccatgcgaagatggagacagagattggagtgatgtcaacagccaccaacacctggaaaaggcagaaacagattctccgtagagcctctaaagggagtgcaaccttgccaacatcttgagttttaattctcctctccaaacctgggagaaaaactgtcttaagcaacccagtgtgtagtaatttgtcacagcagccacagaaaaccaatgcacatttatagtattatatacccaacaatacatcgctataataattattactttatgtaatcttatattttttagaggcactaagagaaaaaaggagaaaattatatatttatggcatttcttatttgtcattgctagttctattcatttattcttgtggattcatattaccatctggtgtctttttttaatcagatacagctgttctcccacacacctcttttatactgtaattgacaaatttgttatatttctgtatgtttttggtccaacaatagagttctacatactgttttatgcaattcgttagactcaggttttctatttcaccttcgaagtgtggcccttaggccaggagcagtggctcacgcctgtaatcccagcactttgggaggccgaggcggatggatcacaaggtcaagagattgagaccatccttgccaacatggtgaaaccccatctctactaaaaatacaaacattagcttggcatggtggtgtgcgcctgcagtcccagctactcaggaggctgaggcaggagaattgcttacacctgggaggtggaggttgcagggaaccaagatcacgccactgcactccagcctggcgacggagcaagaccaaatctaaaaaaaaaaaaaaaaacaaacaaactgtggcccttagaacttaaagtcatattttggttctcaaatcagttccaagagtaggtgatctagccctttcattctaaacactacacatgtagtactagagtataatattgtatttgcttattttttcagagtcagggtcttgctatgttttctagactggggtgcagtggggcaatcatagctcactctaaccttgaactcttgggctcaagagaatcctcctgcctcagtctcctaagtagctaggactacaggtgcacaccactacacccagctaatgcattttttttttaacacacataaagcacagttttttcacaatagattgacaacgataattcacgtcttttttgctagatgatattaagccacagatcaaaaagtcctagacttttatacttacttgaaaaaaacctcaaatttgctgaatgccattgtattaagagctaatctgtctggtccaatcacataatatatttgcctatattcaagtttcatatttctacatatttgataaacattcacactagattttcctctgtgctgcagacaaaaattttcttcaatggtgtctgaaaagggaggcctgcaaccactaccaaaccactctacctgagattagtttattagatagtgcctaacctgaaataaaaatctgctgatagaacattctgcaaaaaaagctctattatgttatagtagagctcatactatattatggtttcaaaggtaataagaaaaatatcatcagatcatcattatggtagctattttaagggaacttaataaaaatttaacagttatcatcaaacactggccacctcaattttaaacagtaaacacacgaattactcccataaaaattataagcataacaggacacttcttggctactattcaatactgacttggatgttctagataacacaagataagatacatgtgtgaatatctatacacatatagacatatttatagatgtgtgtgtatatatacagtatatatataagattttagaaaggaggataaatatatattacatgataaaacttatagtcaatataattttacacttgtaaaatcccagaaaaccaaaggaaaaaatagaactaaaaaagagttcaatgaaatgattagtttaaaaaaataaatataaaaaatgtaattttcccacataccttcaaaatgtagcaatcccactaagcaaaaagtggtatttctaccaactatagataaatgaaaattcacctttaaatgtctcttatcctccatgaaactcatcaaaaacaacaaaaagtacagcagacaaaaaaaaagtcttatctttaatgaaactttgtaaaacatttgaacctcaaccatgatgtgtatgaagataagttactaagtgccatgaagattggaccaagatatgaaaatgctaggagaggatacctttcactgaagatcttggaaagggttggtatattggtattttctagagtagtgattctcactgagatgcaaaaccaaagactccttgttttggattaaaaagatctaggtacagaggctgagggcagaactctctcattatcctatttgtcaacacaaaataggagagaaggcaggactaaatctgagagtgagcagatgcaccattatttcaagattgaacctaaggatgtggcaaggtaaggagaaaagtcaggatgacaagttgccctgtagccgccagttctcatcagttgaagatatattaaaactatggtacacataagccactccatcaaacagtaaatatggctatactgcaagcagtaaaaaagtgaacaggctctgcttccatacagtcaagaacaaaaagaaacacttgacaaggttgagaaaaataaatggaaaaaaataaagaatttaaaagaactggagagaaaactgtagctttggaatacagaaaaaggagatacagcatactgctaatagatgtcctcaaagagaccaaatacatagacaaggggaaaaaatccaaagacatcattcaagaaaaaattttgagatacaaataaacttcagacttttacttccagcaatggaaatccagtttgtcttcagccagtggcatatctcagacaataggcaagccatgagaatggttgttggactgcagtttcggactctattactacatgtatagtatttagaataaaagagctaggtctcctcatgtcagcacttatttgaccaatgggagtatgattttaagtttttagggtcacactttgaaggtggaatataaaaaaaattatagaaagataaatttttgttcagatgcatctactgcagcaatttgggaggctaaggtgaaaggatcgtttgagcccagaagtttgagaccagctgggcaacatagtgagaccttgtctctacaaaaaattaaaaattagctgggcgtgggggcgcttggcctagaagttcaaggacagtttgggcaacatagtgggaccctatctttataaaatatttttaaaaattagttgggcatggtggtgtgtgcctataatcctggctacttgggaggctggggtgggaggatcacctgagcccagagaggtaggggctgcagtgagccatcttcacaccactgcactccagcctggatgatgaagtgagattctgtcccaaaaaaaggacaaaatgaaatatcagcaatgaaaggtcctgctaaagagaaggtttgttaattcataattttaatgtttatctggtcatcttatccaaaaggcaaaaatctttagcctcccttatctttgggatatcgttctctcttaaatgttgctttctcacaaatcccaatttacttgaataagaatgcaatgttatgccaaaagttagggaggcatatggtgggacaaatcctactgggtggatggtttcttcattcttttcacaaatgaaatcttctgaaaatagacgtcagtggcagtttaaatagagaaatgggaaaaagggaagccaaaaatctgagaagcgtgtgaaagaggaggagtttctgtgaagatttcccatactgttctctgtatgcatttttccttttttcctcacgccctaatctatacccacacatactatccctctaggtgcagctcagaattcctaaacctggtataattggaggcatggctgcagacctaaaagttcggtacatctttacagttgtatttcatctgtttaaggcagaaagaataaattttcattccaaagcagttagcttgcttagcagcattaatttaaaatgaagaaatgcacatcctaatctctggcactgaagcagaaaattagttttggtttagaaatttggtgaagaataagttcaatttttatgggctgttttgcatcctggtgagatctaatgaggtctgtacttgtgactacctaataggctgacatgtttcctcctttaattttatctgagacttggtgtcaatgattttttggtttcttaattcaaaaaggcaaactagccaaggggtatttactacttatattgccttatatcacagtgtgccctttctagttccctagaagagataacgaatgggtttgtgtgtttagggaggtaactggtttttagtggaacactggcattatcaatcccactcttagtgttaaaaagagaatgcccgagctacccctctccccaccattttaatcagcaatttttaaatgttttcaaatattatagaaatatgcaggctgatgccaggtgcggtggcatggggctcacacctgtaatcccagcactttgggaggccgaggcaggccaatcacttgaggtcaggagttcgagaccagcttgtgcaacatggcgaaacctcacctctaataaaaatacaaaaattaaccgagcatggtggtgcgcgcttgtagtcctagctacttaggaggctgaggcaagagaatcgcttgaacctgggagggggaggttgcagggagctcagatcgtgccactgcactccagcctgggtgacagagcaagaacctgtctcaaaaaaaaaaataaaataaaataaaataaaataaaataaaataaaaagttaaaaaaaaaatgcaaggtgagtgcagtggctcatgtctgtaatcctagcactttaggaggctgagataagatgggaggatcgcttgagcccagaagtttgagaccagactgggcaacaaagcaacacgctcatctggaaaggaaggaaggaaggaaggaaggagggaaggaaggaaggaaaaaaaatttcaaacatacacaaaagttgagagaattgtgtaattgaccccaatgtaccatcacccagcttcaataattatcgatacttttaggcaggtttctaccagaaaatatgtcctggaaactttaattcttgatctgtgttcagattttgcctttcaaatgtttcattattggggctttggacatattgcacctgtattaaaagaaggatttgagtgaggaatttagtgcttcatagtcaatagtcaatgagtctccttttggctcgcctccttcttagggaaaggaactggttgtagggtgttaggcagaatttgggtgtatctgttgtggctcagagatgtttctcatagaactgatcactgtcccaatatccacgcaaaagaccaaattaaaagcgaggagaaatacctaatgtaaatgacaagttaatgggtgcagcacaccaacatggcgcatgtatacatatgtaacaaacctgcacgttgtgcacatgtaccctagaacttaaagtataataataataataataataataataataataataaagcgagggtgggtatctagcctattcttatcctgcctcatggtgttttctaaatatttacagaaagaaaatttacagagtagtttcctggtcaaactctaatgagtatctcagtactttcccctccacttctcacgtcttctttggggacgggtcgtcaagtctttgagtttctagttattgctattgactggtttataacctcctctttcacccagatcgtcaagggccgtttgcaaagcactcccaagtagagcctcttggagaaggagaaactgctatcacgcaaaaaaaaagccttgagctcgctggctccgctgcctcgaaaagccagagtccggaggcagtttgatgcggacactattccccaaccttcttcccctccttgtcgtctctattgccctcttggcagctcctgggatacaagagggtgcaggacagacttcaacccgcagcaggatccagcgcggaaagctctgcagcaggatccagcgcggaaagccccccgcagcacttctttcggggggctcctgtttccttaagcctagaaggtgtggtcgctcacgttcaccgtcccgcctctcgccgcctccgctcggcagctccacgctgagtcccgccctctccgccggagaggtgcgccggggtcagagcgccgggacccgacgcgcggctcccaaagggcggcaggaagagcccagctgggctcagccacagttatcagcaatctgcgggcagaggatgtggaggttaagatctgggcagcctcagggcgttgtcctagaaaacaccgtttaaggagagaagtgttagtgtctcggggcgtctcccaggctccgccctgcgcccgcagccagcgtggtggtcgagaccccagcccgctgctactggagacagcacctctcgcgcccgggcgggcggcctcgtctctgcacccctaggcggcgctgcgctcctcaacacccggccggctccgctttcccagacggctgcccagcctccagcctagcaagcccggctcccagctggccagccccggcaatgccggcgttcgggaggcgcaacgtcggcggtcgctgagtatccagcccgcagcagtgacggccggcaggagcgtgctcttccccgcggctcgtgctctccaggagtccggagcatggtcctgggtcaccgttggtgtagcgtgttggtggaacgtggacgcctagagggaggatggtgggctgtggggtggcagttttatgtttgtgggtttcctgcggcgctgcagcgggacagctcgagtactcagtgccggaggagacggagcggggcgtagccgtaggcaatctctccgcggacttgaggctgccagcggccgctatgtcctcgcggaactttcgcttcctttccagccaccgcgagctctacttcggggtggatctacccagcggcaatttggtggtcagagagccggcggaccgcgaacagctgtgcagggccaaagctgcctgcgtcttgacctacgacctggtgctcgaggacccgctggagctgcacaagattcggattcacgtcctggacaccaatgacaactcacctctctttcctgccggcgacgtgcagctgcacatccccgagttcctgacgcccggagcccgctttactctcccgaatgcccaagatgacgacgagggaagcaatgggatactaagctacagcctaagccccagtcagcactttcgcctggacatgggatcgcgggttgacggcagcgaatacccggagttggtgttggagaaagcactggatcgcgaacagcgcgccacccacctgctggtgcttacagctcgggacggcgggctacctgcccgctcaggagacgcacaagtcaccatcattgtggtggacacaaatgacaacgcgcctgtatttgagcgctccgtataccgcaccaaggttccagagactgcacccaatgggactgtgttattccgagttcaagccttggatccagatgaagggtccaatggggaagtccagtactccctaagcaacagcacgcaagcagagctgcgacaccgctttcacgtgcaccctaaaagtggggaggtgcaagtagctgcttcactaggtccgcctgaaacgctcttggaggcatacattgaggcgagggacgaaggtgtctttggtttagctagcaccgctaaactgctggtggaggtgactgacgtgaacgatcatgcccccgaactggacttcctgactctttcgaacccagtacctgaggacgctgcccctggcacagtgattgctctctttagtgtaaaggatgaagacctcgattctaatggtagggtcatttgtggcatgtctagtgcaggcccttttcagctgacggcttcctttgacaactactacagcctgctgattgatgggcccctggaccgggagcagatcagtgaataccaagtcctgatcacggcctcagatagtggctcacccccacttagcacccgaaggacaatcactgtgtcagttgctgatgtgaatgacaatacaccaaactttcctcaaccccagcaggaacttttcgttgctgaaaacaatggccctggggcctctctaggccgagtgtttgcccaggaccccgacctggggaagaatggccttgtctcttatgagctgttggatgttatctctgaagggccatcagcctctagcttgctggcagtggaatcatccagtggggccatcactgccaaaacttcctttgactttgagcagctcagggggtttcatttccaagtagaaggccgggatggtggcattcctcccagaagtgcaacagtgactataaacttgtttgtggtagataggaatgacaattatccggttatcttgtttcccttgcccagaaatggttctgtcccagtggaaattgtgccccgctctgccaggactggacacttggtcacaaaagtggtagcagaggatgctgacagtggttctaatgcctggctttcctaccacatctcccgggcgtctgactctagtctctttagaatttcagccaatataggtgagctccgtactgctcgcttagttcttcccactgatgcagttaagcagagggtggtggtagtggttcgggaccatggagacccaccactttcctcctctgtcactctgggtgtgctgttgagcaactctgtccctcagttacttccagactttgaagatgtctgggaaccaggagggcagctttctgcccagaacttgtatttagtaattgccttggcttgtatttcctttttatttctggggtgcttacttttcttcgtgtgtaccaagttgcaccagagcccaggctgttgcgctcagagctgctgtcgctctacagaggatctgaggtatggaagtaagatggtttcaaatccttgcatgacatcagccaccatagatgtcactacagttgagagactttctcagacttatctctatcgggcctctctgggacttggttctgataataacagtttgctgttgcgtggggagtacaatgctgccgacctgcgaaatcttgccactggggtaggactgaatttgccaatatcctgtattcagattcggaataggaaaggggatcacgctaatgtcaatgccatggtaagcaaattttatggaatttgattcctttggcccggagatggctgctagctgtgttttgaaatatttcttagacaagcctttcacaacatttcatcaattgaactaaacactccttcttagcacttcctgtgccaagaaatctggaagtatagaagtattagaagattgccctaggcctcaagggacttatagtttatttttgagaaacaagggcaaaaattaaaacctatttaagaacaataaaagtaatatgacataaaggtctaaaattaaaaataaaataccaaaatattttataagcaacagatgtgtaaggcactctaatatttaaagtgaagaatgaaaaatatgtaagagtctgctttatatgaatataatatggaaggtgaaacatttacttaaactattgcaatgcattattaaaagatgacgataaccacaaaagatgtaaaaataaattacaatgggggttaaaagaagggagaaagggaacataagagaacatttgagtgaggaggaaggagtcagagaaggctttgtgatagagatcacagatttagttggatctttaatacgatataccatttaataaaaaacagtgtattctctagcctatacttttaatgaataccattttggtgaaggtgtcttctttgggaatgacaccctaaaacatagctgatagctccatagcagtgttttgtaactgctttggagtttttgcttacacaaaaactgtaagcctctctcataacatctatttatactgataggagatcatattgttggatataggacttgacaaccttttgttttgtgtttctattgataatattttacaaagaggaaagatgagtaatttttatgtcagaaatatttatgtgttcaaaggtgcacttaccatccaaagtccattcaacttggatttaatttcttttattttaggggacaaatacacttaacaaataagtaaatatcatatttgagagtaatgtatctaatgaaagttaagtgattcaaatatttcaatttatctgttagtggcccttggcatttcaaaacttcttttttttttttgagacaggggtctcactatgttgcccaggctggtctcaaactcctagcctcaagtgatcctcccacctaggcctcccaaagtgctgggattacaggcatgagccactgcagctggccctcaaacttcttgagtgcagttaggacaacattttgaagcaattctacggtattactttttgacttctcatagaaatcctagatgcaagagaaggaggtgtgtagaaattaaggaaggaaaatgaagcattccttgttttactattctaggcaataaggggaaaagtggcttgtaagttattcttcctcaagtaatgatgttaactgcaaataaaataaatttacatatgttaaaattttctgtacttaatattttcacaatataatagaatccagcatataagatatgcttagtaaatgctgactgaatgaataaatatgtgcatatatgaattggatggtaacactgttcaacacagagggaaaaactttaacttacttttctactttagatgtgtatatgtggttaacagtttaaaggtcactttcaaatgtactgtttcaatgattattttcttcctcatgacctacactaataacataacagaggaattttctgattgtagagctagcaagaaaaacttcaatgctgtgtctgggactaagtatgagtccagttctacagatgacaaaggaattaataggtatgcacatcattacattgtgatatttgcagtggatactatttaatagaatctcagttaattttagggaaggaaattggtgcactacaatgctagtatttcaggtatcagagcacttaatatgtgaacacttttcctaccaagaaatttcactatttatttcttttattttcattgctttctgtaacaaaaagagaggagaataccagtaatggctgtaaagtttgggagtgaggaattttttttagaaacacattttcactagactagaaaggaaacataagtaagcgataggaaggctgatgaatctagaagttagaaggaaaattagctatttaaaaggaaaaatataggaatgacagaggaaaaaacaacccttcaaaccaaatttttaaacatatatgaatgattaacaaaataatagagatatactgttcatatgtgcaggaatattgtaccatcccattcattcagttgaacagtctttttccatcattgttgatattttgctttttaggtagctcattggtctgctaataattgttgtgggctggatatttccttataaataaatgaattgtgattcataaaaccatgaataaaataacttctataaatatggggtatttgtaattcacaaaggcatttgttatttacttcttcctgttcaattacctattgatctgatcttaattctttagaaaagaattcttgtcatagtatcctgaatgccttaataacaacaggattctagaaataaaatatttattgctttcattttatttcaaatcatttgaaaagcatgacatttaacaatgattataatgtgtgtctgagtcttacagaatcatgttgatgcatatgtgtttatattttgctcaaattctaagttctttcattttagtttacggtaagtttacagtatatattaacatagcctgtaatactaaaaattatcagtttaagaaattcaggaaaacatggtttttatctctgtatttccaattgataatatttaagatataaacaaaattgattcactgattgtataacaattagacaatgtgtacctcatgtccatttttttctgttaatattcttgatgggcaatttaaattttttagaatggtatctaagagggtacctctgagatataaatttctacttattaaaaactgcattgacaatttttaaaggtataaatatattaatgtagcaaaaatgcatgaaacacttaccatacaactggccttattaaatttccacatgaaagttatacatagtttcaacataccaatgttatattagtgtattgttcacctggaattaaagcatcttcttttttgccagggtatataggaaataggatatctcctctttgcaatgtcatttgttaacagtagtagaatgtttgtggcattcaaggtgctttatttaacatacattccacaagtagactttcccatagggtaattagatgttttgtatatctattttgactttgaagctgataaccacactaaaaaactttagaatgatgaaactaaggaagtttgcatgacatatgaaatatattcaaattaaaaaactcatatagacaacacaataatattgtataatatagaccctcaaatcagtaaaaaggaaagaaaaagaacattataatttgagtggacataagagaaaagcaataccttggaaacatataagtgggaaagtattgacaatgtgtctcataatgttaatgacttattgtcttttgttgtcttcaatattttcagttagagggaaacaataatatttcaacaactaaattaacttagctaggttggaatgaaggtggactaaattgctgaaaggtttttacaatgctcaaatgcatgtcatatgaatatcggaaatattaacacttggcagaacttcaagtgaatatggattacagtccaggatcctgactaaagtattatgggaagtaaggaatttgttggtaaaggttgttcttaagaaacaaagctaaataataaaggtagatagccactcattttgttcccaattttaattgatggcataagataatggttcaggatataaataaattacatgtctgttatattgcatttatgaaaaagaaaggactataaacacaaaaggttattatatattcatttggaacttgttttggaatctggaaataaatatgcaatctcgtattctcctgtgctgtagagaaagataaacactttatttctaacccatcccaaattccttggctgttcctagagccatctggttaccatctacagatattctgtgttcataggggcactctaatgacataccttcaaaatatactctgaattcaaacacattatggttattctttagaattgttaagcaaagactacagctgttttgtttaaactcaaaataatgttaatataaaataaaaaccaattaagaagtcttaatagtgggtttttaggttgatttgtctttttcttttcttattaggttaggctggccctgttaaacaagttggaaatcctgtctctctctctgtctctctcacattttttttcctattcctcggacacatttactgagattggtgatacagctttcttaaatatttggtagaattcactagtgaagctctctgtacctacagttttctttgtaggaaaattttaattgagatcaaatttctttgtatttttattgctcctatttcattcctgtacctttaattttttcagatatatgttagttttatctgtacttttgaatattttggcataaagttgtttataatgtcctgttgtgactttttttcacatctgcaggatctgtagtgatgtttcccttttcaatcctggtgttagtgtcacctctcatttttcttgactagacttggaagtagtttattaatgatattagtctttccaaggctaacttttggtgttttgggttcgctttgttgtatgtttgctttctattttattaattttcatactttattaatttatttccttccttatatgtttatatttcagtgtgcaacagaagtactctaaacatacttttcatttctatttcctcacacaaaatgtttaaaagatttgtacttaattgtggagatttatcaaaattaataataatcagtgcttcatcaagggcattcttactggtatttttcttactgcaaatgtccaatcatgaatgtaataaccaccagtacagtgtggagccactgctttgactccttctgtggttctatggtggccagctttacccaccaatgcttttgcattatcaatgcaagtgtaaatatagtgaaaaatgcaaataatgttttaacattattttgaaaattatattcacctcataaacacccaaagggtccatagaccacacttcgagagctaccgttctaattctatcatttcttcttttttttaattaattgtaacatttctgtaatgggtcttcaactatttgattagcctgaggtacagttcacacaggaaaggcaggataaatgtttgattcttcccctttgtttagcagtattcaaaacaatgaattgattcctggccatcttacaaaaaggaccaaggccttttttaggtgtcattatgaactcattgacttaaacatatttgatatggcccaatccatgtcaattatctttttaatgatcaaattatgctaactttggcaagttgggaactgttcagctttgctcctgagtctttgtgagtgtgtttgtgtatcttgttttaaaccttttattttggaataattatggattcacataaagttacaaaactagtatagagagatcccatgtgcttgtcacccacttttccccagtgataacaccctgaatccttttcatgtgagtcttaatagtcttttgaatgcttccttgatttctggtattacaagatgttcagattatcttgtacatttcctttcccagaatcagccatttttcaaagagctttcacttatttttagtgaaagatgatacttagagatataatctcaacaacaggtgtgcttattgctgctgggtcagttgctgtttctaggtatcttcagctactgagctaagggatgtctattttttaaaagataaaatacatcacatgtttatactaatctaataaagttcagcactccgaggtttttacttaacttcatcaatcttacattcctatttctcccatacgtcaaatcccagttttcattaacgtcaacagaattactcatttgttatcccacgggactcaaacaatggacttagaaaacaatttcagcactacagaaataatatgatactgtagcagtttaagtttttgtcattcttttcatttataaggcacatccttacaaatgcccagtaggcatgtacagtcaaattattgtgttttaaagtatcttggaaaagttcctctctgtgtagttaagccaccagctagatacagagctaggcttttttcaagtcgctttcaaatttagggcttgctttttaaattttaattttcttttataattatgtgaaatatttacatggctccaaaataaacttataaaacaaaatatatttagagaagtctagtatctattattccatacaatacacattcttccccactttgagttttttcacttaaaaatataaacgagattatttcatagtagtatagtatttacacatattccatactgcttaatggtgtcttttgattagcaattaatgagctccaatttatcaatattatcttttttttttttttttgagacagattctcattctgttgcccaggctggagtaaagtggtacaatcttggctcactgcaatctctgcctcccgggttcaagcgattctcccacctcagcctcccgagtagcggggattacaggcacccaccaccacacccggctaatttttatacttttagtagagacagggtttcaccatgttggccaggctggtctcgaactcctgaccttaagtgatctgcccgccttggcctcctaaagtgctgggattagaggcctaaaccaccacgcccagccaaagttgtcttttttatttagtattctttctatccttttaaagaaaacatatcctgcttcaagtcatgaagatatattcctgtgttttcttctataacattgctatccaatagaactttctgacatgctataaattttctctatctgcatatatggaatgtgtagctactgagcacttgaaatgtggctagtgaaactgggctactcaatttttaatgttactaattttaattaatttaagcttaaataaccacatctgtttagtggttgctgtagttctggaagctttcttgttttaacttgcacatttagatcttaaattacctgaaattgcttttgaatatagtgcaatgtagaagtcaagatttatattttccacttgtaaatccagttagattgcctactttcctcgctgctactgtgcagtgctacctttgtcataagcaacgtgactttatatattctgtttctggactgtctattctgtttcattggtcaacttgtctattcttgtgccaatacattctgtgttaaatatagtaacttttcatttgtattgatatctaattgtgtaagttctctcactttgttattctgcttcaagattaacttagctatttttggccctttgcatttctatataaattgtagattcagcttctcagtttctattttaaaaaaccctgctttgattttaattggcactatattgaatctgtagaaaatatggggtatattgaaaatatcttattttgatctttattgaatctataaaaatatgaagcttgttaacattgacaatattgagacagacaaccgattaacaaggtatattcttccatttatcttttttttttttttttgagacggagtctcgctctgtcgcccaggctggagtgcagtggcgcagtctcggctcactgcaagctccgcctcccgggttcatgccattctcctgcctcagcctcccgagtagctgggactacaggcgcccgccaccatgcccggctaattttttgtattttttgtagagacggggtttcaccgtgttagccaggatggtctcgatctcctgacctcgtgattcacccgcttcggcctcccaaagtgctgggattacaggcgtgagccaccgcgcccggcttcttccatttattttattattttatcttaatgtttatgtgtgtgtatgtgtatataggggtattgcacaacttttattagatagctgatattttaatgctattttaaaagtttaattttataatacaaaaattagctggacatgttggcacatacccgtaatcccagctactcaggaggctgaggcaggagaattgcttgaacctgcgaggcagaggttgcagtgagctgggatcgcgtcactgcactctagcctgggcaacagagtgatactccatctaaaaagaaaaagaaaggcagggcatggtggctcacgcctgtaatcccagcactttgggaggctgaggcaggcggatcacgaggtcaggagatcaagaccatcctggctaacacggtgaaaccccgtctctactaaaaatacaaaaaattagtcgggcgtggtggcgggcgtatgtagtcccagctactcgggaagctgaggcaggagaatggcatgaacctggaaggcggaacttggagtgagccgagatcgcgccactgcactccagcctgggcgacagagtgagactccgtctcaaaaaaaaaaaaaaaagtttaatttgataattggcttttgttgaaagtatatagaaataatactgattttatgttaactttgtatccaatgttcttgctaaatagtaaaatctcatatttttatattttgggttttctacatatactgtcatgctattcccaaataatgttagttttattattgtattttttactttctctctttttttaaaaaaatagagatagagtctcactacattgcccaggctagtctggagctcctgggctcaagcaatcctcccacgccagcctcccaaagtgctgggattacaggcataggccaccatgcctggtcttttaaaaactttctaatcacatagttttcttgctttctgtcattgcctatgaaattcagtataaaattgaatagaagtaatgttaatggataatcttgtcttattcctggtctcagagaggaagtttttaaatatttaatatgaaatacattgtttgattgggtttatttgcaaaaatcctttatcagatttattaagttccctttgttttttaatttattatgttttttaaaaatcatgaataggcattgaatttatcacatattttctgttattgaatggataatatggatttttatccttttattaatagcatgcattatattggttgatttgttaatgataaaccaatcttgcattcttggaataaactcaggttgcttatgatgtataatccttctttatatcattagacttagtttcctaacattttctttacagtttttaaatatatgtttatgatagaaacgcgtttctacagaaaaaaataattatttttaaaggcatagttattgggtactagacttagtacctgaatgatgaaataatcggtaccacaaacccctgtgacatgagtttgcgttataacaaacctgcccatgtacccctgaacttaaaagttaagaagcaacacacacacacacagatgcgcacacacacacacgcacaagaaattggcttttaactttccattcttataatgctctagtcggagtttggcatcaaggctatcctggctttatatagtaagttaagaagtgttacttttcttttacttattcggaagagttgtcttagtccatttgggctgctatatcaaaatagcataaactgggtggcttaaaaacaatagaaatttatttttcacaattctggaagctggaaagttgatgatcaaggtcctggcagatttgtgtctggtaatggcccactccctggttcataaaacagaatgtcaccttcttgctgtctcttcaccttctggaaggagcaaggtagctctctggaacctcttttatgagagctgtgccctcgtgatctaatcatctctacaaaagccctacctcctaatatcataatcttaggggttagcatttcaacttatgattgcaaaggaggagggaacacaaacattcagatcatagcaagtttgtgtaaatcagcatttttttcttccataagcatttgaagaattaagagtgaaatttataggcctagaattctcttcatgagaatgttaattataaattcaatgtctataacattaatagttatagaattatacagagcctctatttcttgttgtattagtttggttaatcaaaatggaaaattttaacataccttgctcaaaaacagaacaaggagacaaaagaaaatcaataagggtactgaaaacttcaataacaggaataaccaacttgtatgtatgtgtgtgttgctggacattatcatttgtgagatacatttatattgttgtgtgtagctgtgtatcattcattgtcattatatagtatttcagggtgtgaatggtcaatttctataaatgttctgcatgttcaagaaaaagcagtattctgacattgcttgttgttgtgttctgtatatgtccattaggtcatctttgctagttgtgttgttcaaatattctgcattcttttttattctttttgtttgcttattttatcagttactgagaaaattatgttaaagtgttccacgatgaatagtgaattgtttctccttggattttgtcaattttttgtgtcatatgttttaaggctattttattttattagattcttaaccaaatataaatatgtgatatctttctgctaaattgaaacttttagcgttatgtattatttacctctatttctgctagtgataaactattatagtttttgtttgcctgaaatgtcattcttgatagatatttttacatgggtgtaaaattcaagattggcatttatttcattttggtacattaaagttacctcctcaatatcttctgggttccactgttgtctcattgtgctgcttcatcagtaatttattatctttcttccaattttactaattttgtcttcttgtgtgtccaacatgctattaaaagtattccttgagttgttaattttggttattgtgtttttcattttaaaaattataattattactgatcaagtctgccatgatattttttataggtttctgttccctgcaattttttttttcaagacaagtcttgctccgtcgctcaggcgtgatcatagctcactgcaatcttgaattcctgggctcaagtgattctcctaccttggctcccaaagtgttgggatttcaggcatgagccgctgctcctggctcctgcaaatattcttaagcttgtcatttatttatttaaatatattaaatcttcatctgataattccagagtctgaagtctgcaagtgtatacctgctgtgtgctgtttcagctggacagctccatatttttatgtgtgccaacttttatttgacttttgatggtccatatcctgaaaatgatatttgccaggatatcctgagatcttggatggaaatacctttcttcacgatagatttttatacaccttccagtgagtgaatactactgctagtaaaccactttaaatcaagttcaagacttgaagctccttggctacttagactacgtattctcagataaaaatatgcaggatatctggtatctagttacaagtttataggattaaattttcctttcctattttccttctggcctttttggtgccaagtcaaattccccagcagttttctgggctggagagtaggtgggtttagttttcacatactattactggaaagattagtcctttgaagttccagcttaatgtagtttggaggccccataagactccccatcttgaacatcctgcttctttttttttctttcttcctttctttcttcctttctttctttctttctttctttctttctttctttctttctctttctttctttctttccttccttcctttctctttctttctttctttctttttcttctttctctttttttttttttttcagatggagtcttgctctgttgcctaggctggagtgtagtgacaggattttggctcactgcaacctccgcctcccgggttcaagcaattctctgcctcagcctcgggagtagctgggattacaggcgcccaccaccacgcctggctaattttttgtatttttagtagagacgaggtttcaccatcttgaccaggctggtcttgaactcctgacctcgtgatccattcgcctcagcctcccaaagtgctgggattacagccatgagccatggtgcccagcccatcctgcttcttaatttctgtcttcctacaacttatgtccaattttatgtcaagttcaatattctgtttacctctttgggcttagctttcctccacaatttgtcctagcagttccccattatcttatcagattttcagtgcttttaagataattgttttaatgttttacccaagaatatttagttgatttcagtaggatgactgctgtaaataatttaggctgccattacctgatattccctatcatagagttctatcaccagtgactagcatctaagtaacattgaaatgcttttatgtatatcttaaaatatttgaattacttttgttttgaaaacaatagtatctttactttccctaaaccttgataagggattcatatctcttattattaattttgggaaaaaataattcataaacctggtctattatgaaatgtttgctaattgagccaagagagcacatgcattcatctaaaacattcatataatcaaactttattaaaggtgatatttgtggctttacttgacataaaacagcttccatatttctctattccagacattttatttaaaatacatttttgagcataagatatttaaaatgtgtaggcaaataagatatccatatcattaaaagatatctaaagctggtaatggtggctcatgcctgtaatcctagctacttgggaggtcgaggcacaagaatcacttgaaccagagggaggcggaggttgcagttaacggagattgcaccactgcattccagcctgggcgacagatgagactctgtttaaaaaaaaaaaagatatctaacaataaacaagtaaactatcaattataatacaatcaaattcaagctacaactgaaataaatacatggtatctaggaaactcagaggggaagcaactaactcagtatggtggggggtagggggttgaggcagaaaaatcttcccatataggatgtcacatataattatagtgtttatatttgccaattgtaaaaaaaaaaatggcaaaagagatctcattcagaaaagcaataagcacaaaagttttaggaataactttaatgagaaatatgaagtaaaagtatgaaattttgttgaaaaatattttaaaatcttgtataaatgagatggcataatgtatttttaggcagaatattacaaaggcatgttttccacaaactagttggatttggccctgtgtcaataaaaattccagtaagatgattattttgctttagcatgacaacttttttcctaaaatttatctctaagaataagcgtgaagaaaaaaaaaattgaaaaagagtttaaagtgtagacgttctgttatcagaattaaattttggggctgggtgtggtggctcatgcctgtaatcccagcactttgggaggctgaggtgggtggatcatttgaggtcaggagttcaagaacagcctgaccaacatggtgaaatcctgcctctactaaaaaatacaaaaattagccaggtgtggtagtgggtgcctgtagtcccagctactctggaggctgaggcaggaaaatcgcttgaaccctggaggtggaggctgcagtaagccaagatcatgccactgcactccagcctgggtcacagagtgagactctgtctcaaaaaaaaaaaaaaaaaaaagaaagaaagaattaaattttgggaagtcattattagcaatattgtgtagtatccattggacaggatgagagtagaggaaaggagatcattaaaatatacaggtaagaaattatggatatttaaattcagactagaggcaagggctttaatatgatataaaggatagaattgataaggctaaatgtgggagatacagtaaaataataaatagatgctatcaaggttcatggaaatgttgagttcagtatgcaaaatgtcatgtaaatagacgtagacaataatcattttaatttgttgatctgagtggggctgaattctaaatatagactttgattcatctgcataaggaagctggattatggataaaaccatctatgaacaatgtataaagtgtgaaaaaaagggataaggtcaaaatattgtggaacacatttaaaggtctgagagaatgaaagtccacagtctaaaagcagtaggagatgtaggaaaaaaactaggaagtggtcctttatgcaaagcaaaagaggaaagtttgaagaaaatgagttgattgaagttgtaagatgtcacagaagtcaagaagaggtctctgaagtgttcattggactggtcattatgatgtcatgagcactttagcatgagcagctttagaagtgtggttataggagaagcagtgaattaaagagttaaagtaattaagaaaacagagacagaactactgagtaccccccaaaagcaattatcttcaaaatatggaaaaccagattgggatacaaaaaggtttcttgttaaagataaaggaggcctgagtaagtttatatctcatgggaaaatggtaccagagaagaaaaggttgaagattagaagagttgaaaattaaagggccaaggctggttttttgttggtttgttttgttttgttttgtttttaaagagggttttactctgtcgctcaggctggagtgcagtgatgtgatcactgctcactgcagccttgacaccccgggctcaagcgatcctcctacctcagcctcctgagtagctgggattacaagcacgtgccaccacacctggctaatttttaattttttatagagatggagtctcactgtgttatccaggctggtctcgaactcctgatctgaagtggtctgcctgcctcggcctcccaaagtgctgggattacaggtatgaggcactggactgaggcttcttaaatggtggcaaggaacatattttgtgctttaaatgatttaagtatttaaagatcatagttttcctggcaacttactgtagagatcacttcagaatttccctgggtagagtagtgtgctgtagaagtatagtgttgtaagccagtgtggattgggagtccataccccttatttatctattctgtgtatcctattaataacagtaattatcaggttattttgcctttgaacaccttagtaagtctgagcatttacatggaaaaaatgctgggtttattcctcctgttattgtattttacaagtctgtcgagggtccacagtgatctttgccccataattgtaaaatgagatattagaatcatccttatttatcttaaccacctactccactgtacagttcctataattccacaaacttctctttatattggtttatgccttctttagatgattgtgaataagagtattatcttaacctctctggtgggtctacttctgtaacggttgtgggtcatgaattattttttactcagacataattatctttggtcttatataaagaaaaccctacagactccaccaaaacactcttggaactaataaacaaaataaagttgaaagataaaaaatcaacttacaaaaatcaatagcatttctatacactattgaactatctgaaaaataaatcaagaaaaccatgctatttacaatagctatgagaaaataaaaatacttaggaataaatttaaccaagaggatgaaagacctgcaagttgaaaactttaaaacattgatgaaagaaattgaagaagacacaaataaatggaaatatattttatgttcatagcttggaaaaattaatactgtttaaaatgtccatattacccaaagcaatatacaaattcaatacaattcgtatcaaaatttcaatgaagtttttacagaaatataaaaaacttccctaaaatttgcatggaaccacaaaacaccccaaatacccaaagcaatattgagcaaagtaaataaataaataaaacaaaacatacaaacaaaaaaatgaagctgaagacatcatactacctggcttcaaaatatacttcaaagctataataatcaaaacagcatggtactggcataaaagacatgtagaccaatggagcagaatacagctcccagaaataaatccacacagttactgtccactgatttgcaacaaaagtatcaagaatatacaatggaaaaaggacagcctcttcaataaatggtggtgggacaatttgatatccagatgcagaaaaatgaaactagacccttatctcacactgtatacaaaagtcaactcaaaatggattaaagacttaaacatagacctgaaattgtaaaactaacaaagaaaacacagtgggaaagatgaaagatcaataacactgatctgagcaatgatgttttttatatgaccctgaaagcacaggcaataaaagcaaaaatagactaatggattgcatcaaactaaaaagctcctgcgcagcaaagaaaacaagagtgaagggacaatccacagaatgggagaaaatatttgcaaaccacagatctgataaggagttaacataccaaatatataaggaactcaaacaactcaatagtaagaaaacaaataacacgatttaaaagatgggtaaaggatgtgaatagacatttctcaaaagaaagcacacaaatgaccaacaggtatactaaaaaatgctcaacatcatgaatcatcagaaaaatgcgaattaaaaccccaatgagatatcacctcacacctggtagaatggctattattgaaagaggaaagataacaagtgatggagaggatgtggagaaaagggaactcttgcacacggttggtaggaatgtaaattagtacaatcatagaaaacaatatggaggttactcaaaaattgagactaaaacaactatccagcaatcccactactgggtatatatccaaaggaaatgaaatcagtatgtcaaagacctatccgcactcccatgttcattgcagcattattcatgatagttcagatatagaatcaacttaggtgttcatagtggatgaatagataaagaaaatgtgaaatatatatatatatatatatacaatggaatactcatcagccattagaaagaatgaaatcctgtcattcgtgacaatatggatgaatctggaggtcattatgtttagttaaataagccaggcacagaaagacaaatactgcatgatctcattcatgtggaatgtaaaaaagctgatcttatagaagcagagagtataacagtgattaccagagatgggtagggcagtagtaaggaggagagattgaggagaggttggtcaatgggtacgaagttacaattagataggaagaataagttctggtgttttattgaacagtagagtgtagttaagaataatgtatatttcaaaatattatagaatagaggattttgagtgttctaacttcaaagaaatgataaatgtttgaggtaatggatatactaattaccctgatttgatcattacacagtgtatatatgtattgaaacatcagactgtagcccataaataggtacgtgtcaattaaaataataaaaatagtaaaatgtatagttacttccacggggtagaaaatgtggtatatattcatggtatactacacagccttaaaaaaagaaaatcctgtcatttatgacaggaaaaaaaaataagataatccaatgtaccatttgttgaaaatactttttctttttattgcattatcttgacatctttgtaaaaagtcggttgaccataaatgtgtgggcttaattctggactctatttcactcctttgatctatatgtttatcctttcactaaaagtagactgtcttgatattgtagctttataaatttgaaaatcagctgtgaaatcctccaaccttgttctacttgtaaacattgttttggctattataggtcatttaaattttcatataaattttagaatcaacttttcaatttctacaaagaattccgctgggatttatattgggaatgtttttaacatttagatcaatttagggaagatttggtatcttaacaatattgagtcatcagatcgtatgaacatatatacctccatttacttgggtctttaaaaaattgtctcagcatgttctgtagttttaagtattgaggtttcaaaagttttttgtaatacctattcttatgtattttatggtttaaaaaattctattgtaaatggattttaaacagacttttaatttgcagagactatttcttcctttccaatattaatatttgtttatttattttgtcattataatggctaggacttccaggacaatataaacagaagtggtgagagcagacattcttgccttaaccctgatcttatgagaaaagtgttccatattttacaattaagtatgtgctactcataggtttttcccaaatactttattaaatttaggaagtaccctttctggtttgctcagagttttatcatgattcattgttgaatttcatcaattttcttttaatctattgatatgagcatatgatttttcttcgttttactaatatgttggattacactaattgatttttgaatgttggaaaaaaccttccattcctagggtaaatcccacttagtcatgatatattatcttttcaaacattgttagatttaacttgtattttagtaaatatttttacatctgtgttcatgtagaatatctgtaaataattttgtaaagaatatcttttcttcttgaggggtaatgttttcattaggttttagtatttctaacctaataaaatgacttaggaggtgttccttcctctattttctgaaaggttgtgtaatattggtgttatttcttccttcagtgaaacattctgtgccagggattttcttttagggaaagtttctgataataaattcaatttctttcatagactttctattaaaaatgttaacactatttatattttatttcatgctctgtcaattttgttaagttgtattttttaaaggatttgtcagtttcattcaatttatcatatttttggcacaaagttgttaataatattctctcatcttttaacgtctgtataatctgtagtgataacatctttttcatttttgatattggtgatttgtgttctatcctcttttttatcaataagtctagctgagaatttatcaattttgctgatttttttcgaatagccagcttttggctttgttgatatattttctattgtttggtttctatttcattaatttctgcttttgtctgtattatttgccttcttatattacttcgggtttactttgctctcttttagattttaagtggattcttaggtaactgattaggtaactgacatttcttctaatataaaaaaattaaagccacgaatttattagtatgaactgctttatttgcattttactaatttttatatgtgatgtttttatttttattcatttaaaagtatgttctaatttccattatgatttaactctttcacccatttattacttaggagtgtgatcaagtttacaaatatttttggttttcctagctatcttgttgcttttgatttctaatctaattctcttttggtcagagaacatactctgcatgatttcagtcttttaaaaatctgtttagacttgttctgtggcccagcaacagtctatcttgatgaacatatcacgtgcacttgaaaagaatgtatattctgtaattgttgggtgtaatgatttataaatataaattattgttatccagattttctgtgtctttatttttttgtctagttgtcctatcaattgctcagagagcagtgttaaaaatcacctatcatcattgtgtttatctctttgtgcccatttttgcttcatgtaatttgaagccctgttattaggcacacacattgatgattattataatttcctgatttattgatccttttatcttcataaaatatcgatttgttgctggtcatactttttttcttgtagtagcttttgtgtgatattaatgtggccattctagtctcatgttttctgttttcatggcatattgctttttgttcattttacttttgtttctttaaagtatgcccttgttgaagcgtattgttggatcttgctgttttacccattttgataatatctgctttttaactgaagtgcttagcccattcacattagtgtaatatttgatatgtttagatttgtgtccttcaatacattatttgctttctatttgtcccctctgattttgttcttctgtttccgcttatctgttgtcttttgaattatttgggtattcctcagaatctcttttaatttttagatataactatttttagattttttttaatttgcattttttagtggttgctgtaaggattacagcatacatacttaacttttctcagtccacttaatagtgtacaaccttcataaaatatagaaaagttacaaccatataagactatttagctcttcctgtgccattgcttatgctatagttttcatttgtattaaatctcatacaatacaaaacccacaagacacagttataatttttgtttaagcagttattatgtactttagagaattaagaaggaaaaaaatagtcatttctgtttacctagtcatttaccatttctagtgccattaatttgttcctaaagagctgagtttatccataatgtctttttgcttcaacctgaaaaactttacttagcagtttttgtaatgcatatatgctgcagtgatttatcttagttttcctttatctgaagatctatttatcttccatttgaatgatatagaattctgggggattgacagattttattttcttccacttaaaaaaaatgttattctactgtcttctaatgctcatagtttctgatgagaagtgtgtagtcatttaagtcattattccctgtgtgcgatatgattgtttttgttgctcttgcatggctggggggacacttattttaaggttttctacttacctttggtttagaagtttgactatgatgtgcttatttatgcttttctttatttttatcctgtttatggttggctgagtttatcaaacatgtacatgtatattgttaaccaaatttgacaaatttttgttccttatatccttaaattttttaatcctaatttctctctatcctttctggactccaattacatacatatggtactttttaaatattgtctggttttaccatagtagggttaaagtttggtcctttaagactatacatttctttcatattcttgtatattctatattgttcaataggtctctgagatttattttatttttattttatttcagttctttttcttttcttcagattggatcatttctattgatctattttcagattcattgacttttgcctcttttagctccatttttcccaagatcaggcagtgagttttaatttcaaatattatatttttattgctaaaatttccattggctttcttatattttcctttttttctgataagatttcctttattttcattccttaccaataagttttcctttatcttattgaatatagttatagtagctactttaaagtcattgtccgctaattcccacatctgtgtcatctcaggtttggattcttgatggtctttacctttaggaatgcatcacatttttctggtattctatgttaggtaattttggattatatcttgatattattaatgtgttattcttgagattcatcattctgtttgtgttagtccattattgcactgttataaagaaacacccaagactcggtaatttataaagaaaagaggtttaattggctcacagttccacaggctgtaggaagcatgatgccggccatctgcttggcttctggggagccttcaagaatcatggtggaaggcaaaaggaaagcggctcatcttacatggccggtgcaggagcaagggacggggggaagtgctacgcacttttaaacaaccagatttcacgagatctctctcactgttatgagaatagcaccaagggggaaacctgccccatgatctaatcacctcccaccagggcctgcctacaaaattggggattacaatgtgacatgagctttgggcggggacacagatccaaaccatgtcattctgccactgccctcaccctccgcgaaatctcatgacgttcttacattgcaaaatacaattatcccttcccaatggtccctcaaagtctgaactcattccagcattaagccaaaagtccaaagtccaaagtctcatctgagacaaggcaactctcttctgcctatgagcctgtaaaataaaaaacaagttagttactcccaagatacagtgcgggtacaggcattgggtaaatactcctgttccaaaagggaaaaaccagccaaaagaaagaattataggccccatgcaagtccgaaatccagtagggcagttattaaatcttaaagctccaaataatcttcattgactccatgtctcacatccagggcacactcgtgtgagggatgggctcccaaggccttgggaagctccactcctgtggctttgtggggttcagttcctgcagctgctctcatgggttggtgttgaatgcctgcagcttttccaggcacagtgtgcaagctgcttagaactgctggtggattcccattctggggtcttgagggtggtggccctcttctcacagccatttcactccagcctgggcaacaagagtgaaactccatctcaaaaaaaaaaaaaaaagaaagaaagaaatttcctctgccaggtaccctaaactcatcattctcaaatttaatgttccgcagattcctacagcacaggcataatacagccaggctctttgctaaagcataaggaaagtgacatttgctccagtcctcagtaagttcctcatctccatctgagacctcctcagactggacttctttgtccatttcactatcagcacttcggtcccaatcattcaagtagtctctaggaagttctaagctctccctcatcttccctccacactattccaacctgtgcctggttacccagttccaaagtcactttcacattttcaggatctttatagcaatatcccactctcagtatcaattttctgtactagtcttttctcacactgctataaaaacacctgagactggataatttagaaagaaaagaggtttaactggctcgcagttctgcaggctgtacaggaagcatgatgctggccatctgcttgtcttctggggaggcctcaggaaacttacaatcatggtggaaggcaaaggggaatcaagctcatcttacatggcatgagcaggagcaggagcaagagagagagaagggggaagtgatacacacttttaaacaacaagatctcatgagaactctctcactattatgagaacaacattaagggggaaatccacccccatgatccaatcacctctcacaggccccatctccaacattggggattacaatttgacatgagatttgggcagggacacagatctaaaccgtatcactgttatatttctatgaagggtgttgacatttttgttttagtagagaataaacttgattagactaaaaatgcaaaatctttcttgcttctgcttggtagcagttcaaacttcagtttagttcttttagctttagcctttgctctttatatgtgattcagggacggcagagatgtgggaagaatttgatcatagaatttagggctcaccttcttttgttctgtgcactcaaggattctctacccctctcagttgtggattacagtgctgttgctcctggctcctcccctttgtccttaagctggagaaactagggattatctgtcagagttttaacttcctcatgctgtgtcacaaccttgatcagctattaggccaaagcaacaaaaacgggaaactcacttcatgctgattcttttctccaagttttagtgccctcctctcccaaaactgcctccttttgtttattccccagagtccttagatatttgctttatgtattttggccaggagctatagttgttatctctggaagggtctgtttattatgagcttactttgatctactagactgagcttcagacattgtgttttgaaatttttgcttaacattacatttatccaagaattaaatttaatatttatttatttttttcttcaacttttaagttctgaggtgcatgtgctagttgtgcaggtttgttacccaggtaaacatgtgccatggtggtttgctgcacagatcaacccatcacctaggtattaagcccagcatccattaggtattcttcctgatgctctccctcccattgctcccccaacaggccccagtgtgtgttgttccccttcatattttcatgtgtactcatcattcagctcccacacatagtgggacgatgtggtatttggttttctgttcctgcattattatgctgaggataatggcttccagctccatccatgtccctgcaaaggacaagatcttgttcctttttatggatgcatagtattccatggtgtatatgtaccacattttctttatccagtctatcattgatgggcatttgggttgatcccatgtttttgctattgtgaatagtgctgcaatgaacatacacatgcaggtatctttataataggatgatttatattcctttgggtacatacccagtaatgggattgctgcgtcaaatggtatttctgcctctagatctttgaggaatcgccacacagtctcccacaatgagtgaactaatttacaaccccaccaacagggtaaaggtgttcctttttctccatctgttgtttctggacttgttaataattgccattctgactggtgtgagaagatatttcattgtggttttgatttgcatttacctaatgatcagtgatgttgaggtttttttcatatgtttgttggctgcatgactgtcttcttttcagaagtgtctgttcatgttctttgcccactttttaatgggcttgtttgggtttttcttgtaaatttgtttaagttccttgtagactctggatattagacttttgtcagatggatagactacaaaatttttctcccattctgtaggttgtcttttcactctgatgatagtttcttttgctgtgcagaagctctttaatttaattagatctcatttgtcaatttttgcttttgttgaaattgctttaggcacttttgtcatgaaatctttgcctgtgcctatgtcctgaatggtattgcctagcttttcttctagggtttttatagtttcatacttttatgaattacgtctttaattaatcttgagttaatttttgtataagatgtaaggaaagggtccagtttcaattttctgcatatggctagccaattctcccagcaccatttattaaatagggaatcttttcctcattgcttgtttttgtcaggtttgttgaagatcagatggttgtaggtgtgtggtgttatttctgagttctctattctgttccactggtctacacgtctgtttttgtaccagtaccgtgctgttttggttactgtagttttgtggtgtatatgaagtcaatcaagtagcatgatgcctccagctttgttcttttgcttaggatcggcttggctataaaggctcttttttggttccatattgatatggtttggctgtgtccccacccaaatctcaccttgaattgtagttcccataatccccacatgttgtgagagggacccagtgggaggtaattgaatcatgggggcaattatcccatacagttctcatgatagtgagtgagttctcattaggtctgatggttttataagggctttttcctttttgcttggcacctctccttcctgccaccatgtgaagaaagacgtgtttgctttcccttccaccatgattctaagtttcttgaggcctccccagccatactgaactgtgagtcaattaaacctctttcttttataaattacccagtctcaggcagttctttatagcagtgtgagaacaaattaatacacatatgaattttaacatagttttttcgaaatctgtgatgaatgtcaatggaagtttaataggaataccattgaatctataaattactttgagcattattgccataacactgattctgtctatccatgagcatggaatgtttttctatttgtttgtgtccactgtgatttccttgagcagtggtttgtcattctccttgaagaggtccttcacttccctttttagctgtattcctaggtgttttattctctttgtagcaattgtgaatgggagttcattcataatatggctgtctacttgcttgttgtttgtgcataggaatgctagcaatttttgcacattgattttgtatcctgagactttgctgaagttgcttatcagcttaagaagcttttgggctgagacaatggggttttccagatataggatcatgtcatctgcaaacaaagataatttgatttcctctcttcctatttgaataccctttatttctttctctttcctaattgccatagccagaacttccaatactatgctgaataggagtggtgaaagagggcatccttgtcttgtgctggttttcaaggggaatgcttccaggttttgcccattcagtgtggtattggctgtgggtttatcatatatatggctcttattattttgagatatgttccttcaatacctagtttattgagcatttttaacatgaagggatgttgaattttatcgaaggccttttctgaatccattgagataatcatgtgggttttgtctttagttctgcttatgtgatgaattacatttattgatttgcatatgttgaaccagtcttgcatcccagggatgaagcctacttgatcatggtgaataagctttttgatgtgctgctggatttggtttgccagtatcttattgaggatttttgcattgatgcttatcagggatatcagctggaagttttcctttttgttgcatctctgccaggttttggtatcaggatgatgctggccttaaaggagttagggaggagtacctccttttccattgtttggaatagcttcagaagaattggtaccagctcctctttgtacctctgatagaattcagctgtaaatctgtctggtcctgggctttgtttgcttggtgggctatttattattgcttcaatttgtaatttaatatttttaaatcttgggttaaatggttgaatgaatgtgtgaaaagttagatatcaatgaatgaatattcttaaatgtataaactttaatcttgctggatataggataaaatttacattaaaacactgtaattaatcagtcaatttaagtaaaataaattcaaggaagtggtctgaatttctcagtgagcatttagatatttatgggagtcatataaaataaattataaatgtgactgagggctttttattaaggaaaatgaaatattgctatggacatgattctgtgtgtttctttactacactatgaactaaaaattttggagacaaatctaagtatataaattggtttattgatgaccgattgggaatataaataggcacaaaaatttggcgaagcattttggcatgtctacctaaaatttaaatatgtaagcactagtccccccttacctgcagtttcactctgagcagtttcagaaaataggtgagcacagtacagtaagatattttgagagagagaccacattcataaaacttttattatagtgtattgttataattgtcctaatttattattattgttgttaatcttttactgtgcctaatttataaatcacactttatcataggtatgtatgtataggaaaaaacatagtatatgtagaattcagtattatccttggtttcagacattcagtggggatcttagaaagtattctctgtggaaaaggagggactactgtacttttaacaaagcacttcccagaataaacacacagacatatacatgcacacactttcagaaatgcacttaaatattcaatcatggagtaaaaattaattatgaaatatctagacaatgaacattatgtagtttttattaagaaagaagcagaattatatatactgacatgaaaggatgttcattatatatgttaagtaaaaactaagttcatcatatatgttaagtaaaaaaaagtcacaaattaagagaaagtgttaattgatttgagagtttgtgtattttttttcctattttgtgctgaaaagctgaagttggcatcaaccaaggcatattgttatctatgtatcaagctaaataatttaaagatctttaagactattaattcagagatgctgtataaatagaatcagtgccagattttttgtttcaattctatcagccaagtatactatgctttctttgcttgtgatagaaaaaagagagaaaaaacacagaagcaaaaagtaaagttgtacaatagtgtgtagagtgtggttccattttgtaaaatgtatcagtgtgtatatttatatagcatagtcaaaagcctggagtgatataaattttctgttactggtctagtatacaagggaattagattttaaaggactttcattgtttttaacaattctgaacaaatttaatttggtacaagaagtatatattttaaatattattgaacttaattaaaataaattagagctcaaaaaataaataaatcacaggaagttcacagtctgactttatcaggaatgttgctattttcttaacaggtcatcaaacattatcactgatgcttggaaagaagcactttttataatttaaaaataccttttattcttcaacttctgctggcttaaagagcactaagtccacatatcctaggaggcatggctgtccaatatatactatgtgtacattgatttatgaaccaataaatgtttcatacacagttgagattttaaatgagcttatgataattggatcaaaggaatactagtccagcttgagagtactgcagaaaaccaatcacagaaagctatgatgaaattttaattataaaggatattgaatatcctagagtgacaactctgttataataaatgtaacactgaatgggaaagagagaaaggagatttttacccatttctgtttgaaatcaactttctatttctagtaaattatcacaccattctgttttaatttttatatcttaaagttatcattccagtgtctttggtttactgggtttataaaagaattgaccagtagctatataatagatacagaaaagtctgcctgggtgtggtggctcatacttgtaataatattatattattataattgttctattttattattagttattgttgctaatcttttactgtacctaatttatacattaagctttatcatgggtatgtatgtataggaaaaaatgcagtatatatagaattcagtattatccttggtttcggacattcagcaggggtccgaaggtgggcgaggtgagcccactttgggaggccaaagtgggcagattgcttgaccccaggagttcaggaccagtctgggcaacatggtgaaatgctgtccttacaaaaaatacaaaaattatctgggcatgatagtgcatgactgtagtcccagctacccaggagcctgaggtgggagcatcactgagcccggtggttgaagctgcaataagttttgattatgctactgcactccagcgggacaactgagtgagaccctgtctcaaaaaaaaaagtcacaaattaagataaagtgttgattgatctgagaatttgtgtatttttttctattttgtgctgaaaagctgaagttggcatcaatcaaggcatattgttatatatggatcaaactaaaaaattttaagatctttaagaccattaattcagagatgctgtataaatagaatcagtactagattttttgtttcaattctatcagccaagtataacatgcttttcttgcttgtgatagaaaaaaagagagaaaaaacacagaagcaaaattgaagaatttgtaaatcatttctaaataatttcaataaaatgagctttgaaagggaaaatttttagataacattatctcatcaaaatgccttaaagtatattttaatattcagtaagaacagtgtatattaacatggctaatttagaggatttatattttacccacatgataatgtattatgcctgtaactgctaaaggaattatgtagcaaaatctgtcaaggaatacacgagtgggatttatatcagaaaaatcaaagccatttgtaaagccccattacttaggcagaatatcataggtaggaggtagatgttactgaaagaagaagttgggatatgaaatacaaatctattttgcatcatgattttgttaagtccggctgtttattattaaaaacatgtacagaagattcaattgaagtttctaaaagagaaagaaacttgtagttgtgggaacaatagtattccttatgaaatacttagatattaatagcttgagactgataatacaattcttaagttaggggttgcatgtgtagtggtcagatgttatttcaggatctcaagaaacagagccatggtaaaaagaagcttcctggagcttctgataaattccgtcacctttttgggacccagtttcttcatcaataccaacctcattagggtcctgtgagaagtacatgaggtgagatatgtactgaaataatatgccaactcttaagtgccaagacattaggatgcaagggggggtgcccaaaaagtcaacaattacttgatactctagatatatgtatggataattttgagaagtaatccttcttacacagaggtgtaggtttgtttgttccaagcagcaaacataatgggtataggaaagagaaactgtggccttcatatagactgagcttaggaaaacagttggaaaacagttcaaattcaaggtacttcaacaatatctagtgtgtttttgaaatatatttttaaaacccctatccaaatcaatgaatgctttggctaaaacctacttgggaatgagggtgttctttagtgccaaatactcatcttattttagtccatgattttagtccatggctaaaatcccaagagttacagaggagaaatagggccaaacaaggtttctattaaaataagaggtcccaagtgatgaatggaaacttggaacaggtttaatggcaactataagccagaaattagctgaaatacacactaatgaatttggggcatatcttgagtttcagatagaaaattggtactaagtttagtgaattagaaacatagcttaacctaggcagttgcaattcttgttccaaaaatgctcaatttgctgctggactgcatggacacttgctacctccttgttttgagtcattaacaaaatgttgaatgggatatctggagtatcaagtaattgttgactttttggtcacccaacccccttgcatcttaatgtcttggcacttaagagttggcatattatttcagtacatatctaaccttatgtactcctcacaggaccctagtgaggttggtattgatgaagaaactgggtcccaaaaaggtgatggaatttatccgaagctccaggaagcttctttttaccatggctctgtttcttgaggttaaagaacatgatttaccaggctctgtttcttgagagaccaagagtggatccctgtagtccccattagaattctccttctagtttgaactattccattagtaaacactttttggcatgttatttaaacaattacaaaatcacctaactacactgtcttgcagctgcctttctttttttgtcttgtccacgtgagtatattgggagactttgtttaatgtctccacaaattctagatagactgttcctgcagcatttctttttttaaattttgttttgataagcatttattttggcaatgattctagtaaatgaaactaaagtgcccatatgaaaaacaatcttaagtctatgtggttagtttgaagttaccagtttttaattaagccggagtagtccttagtatgaatgccttcatttctaagtgctcataaacaatcactttagtaatattacagttttgaaggaatttatatcaagcttaatggcactttttaaaagataggaaattgggttctctagtcacatctgtaagttatttcagtgccttggaagatcatttatctggccacagataattgacttacttacatcagttttttttttttttgagatggagtctcgctctgttgcccaggctggagtgcagtggcatgatctcggctcactgcaacctccgcctcctgggttcacgccattgtcctgcctcagcttcccgagtagctgggactacaggcacccaccaccatgcctggctaatttttttgtattttttagtagagacggggtttcaccatgttagccaggatggtctcgatctcctaaccttggcctcggcctcccaaagtgctgggattacaggcgtgagccaccacacccggccacttatatcacttttatgcttcctatctccttattgatcttgaggttcaagtttcacttaaccattttcttcaatgaaaaataattttataatttaaaaaacctcaacctttaatattctatgattcttgttaggccatctcaattgagaatactgataaagaagtaaaactccccccaatactggctagtttgattttatctgttaatattacgcaatctgccccaaacctgtctctccctttttattgttacttatccaaagatggcttgaatctcttatggcttgaatctctttgtttattctaagcaattttcagacacctcagccaactatcaataatatattagttttttagaactaaaaatgtagaggatctccccctaaaagccaattgttaatgccaaatatttgactgatatatttcttctggaggaagggagatgtgaaaaaatttagccatcaagttatgtgaaaactttttcatcttcccatccactggatgttttatctgtaaataatgctataatcatattggaaagtattttccttctggggatgcatgaagatcaggaatcctattcgtttttaacaagatggaatttttaaaaactactttggacaactctaaacatcagagatgaccatttgtctcttttttattatataacttgtgctcggtttgtagagcaacataaatacatgaattaaaaaatgaaaactagctccttccctatttgacagatacttctcaacctcctctccataagatatgctctatccctatataggaaatttttctgtagcagcttgagtttactaaaaataagatctgaagaaaatgaagcaattaacatttattgagagtctataagggtttctacattgtgaaggagacagaaatataagacatggctcctgctttcaggttgcttataattaaagagataatattaaattatttggatgaatttaaaaatgacacatgccatcttacagatatgctgtagactgtgaaaatgaaaaaaaaaacctcgtgtttagagtagacactgtttgatggattaggtaggttttcatctggactttgaaatgtatgtaagattttataaggaggagagaaaataagaagctgtttgtattagaattacacagataaatttgtaaatttagttcttttcaaagaacattaattgagcacctctgtgccaagctccctactggatgctgtagattacagcatgtttaggaactaacttcatactctgttgctaaagtatttctgtgttttctaaaaaggtaaatctcttgtgaggaaacaaatctcttgaaggggttctcataacagaagtcccatttacttcatgatataaaaaggggctgttttctggttttgttctcaaaatgtaggatatagttctagacgtaattgggaaagcttaactttgttgcatacgcatcttccctatcatggttgatttcctatatggcatagttaaatgtgtttatccgtgtttgatatctaaagggccatgctacatatagactgccaactaaggttttatctgatgataataaattgttgtatttcatgacgacagcaacaacaacaataatgtacttaactagtcactgtgcaaattgctttacatacattttctcatgtaatcataataataaccgtatgagttttgcttactattgttttccttaattaaaatgagtaaagtgaagcttaggctaagtaacatgtccatagccaaacagttagtcactggcaggagtgtgactgactccaaagtctatattcctaattactgtgttctactttttaatagagagctcttgaaggtccaaggaaaggaatgcataatggtgtggtcaaggcattagtgttaatatttgtagaaagggtaattaacaacagtctgagcaatcacattctaacaactagtaaggttggcaggagcctcagtataatggtgtgaggaacgaaatcattatagtgccaaatagagtataccatctctttagtacaatgtctttcaaaatgaggctgattgtgttggctttatatttgactccttaataattaaggcagtaaattctagctggagctaaatacctacaaggcctaaaacagcataatggacaacctggcaggtgtccttgctggaagatgacaagagtgctgaaaggagagtcctggtttttctcccaagacatgacatttgggggcttccattaaaaaattaccaagcctctgccactgtaatctcttccttaagtgcctatgattttttcacagtcacaggtctatgcctggtcaatacccagtggccaggtctctgagctgcgtgcagagatggcagcgacttggagggctgggaggagataaggggaggaaagatcacttttcatgacaacttacaacttgattccacttataagccatttattttcagaaacaagtaatgggtgaggacacaggccaggtccacaatttgtgcacttgagagattaaggcctccgagatcaaattaccacagcaaactgagacagaattattgtagggatgtttggggaggatgcagagagaagaggaagaagccagagacccaagaaaggagacaggaatagattttgatgaaaattgcttcctactctgtacccttgaggaaacaaagaggacaaataagaagcagcagtgataggaggctgggcgcttctctggaataacactggctaggtagtggagcattgatagtgagtgtgcttggttggtggaacgaagggatgtgctagttcaggcctttgaattctgggtgtcaggatcacaaccttggctcctttaactgtccgctctaggagggaagcatgccaaatgtcaggtctcactctgactttgttccagtccatagctagaaaatgacccatagaggaagatctacagatgacagaatactgggagatgaagagaaaggacgttttagtgagtgctttttttgcacatgaggcaatagatttcaaattcctgtggaagaaatgtgagaacctgggaagagtgaatattcagaactgagcagcagaggcaatgacacagcatggaaagatttcctctgatccttctaccttctcttttactgaagtgaatttgttgtctctgtgttgcctctatagcagtacaagaggaaacttggggacacagaagaacagaagtctaaggagtcttatatttaaggaagataagctgcagtcattgaaattgctggttattgtaagataaatcccagactcccacattttgcttaatgacagcagatttttttttttttttaactgcaaagcattaatggaatccaaattccagcctggcttaggagatcaacagtaacgctcttgatttaatggttttgcagactcttgaagacattgtcatccattaaagaaaaaattttaaattactcttgaaagaaaatgtcttgggtgataaatgtaaaagatttgaagcaagattagaaaaagcttgagagaagaatctctttaaaaattttaccagattttccccattgtcgccaaaatgggtcaaataatagatttgcctacagcttcatggagactatttttttaaacagagcattttaaacatttaaatattggttatttgccaaggcacacactgaaaataagggccacttggccgagagcagaattgagtcttggatcccaggatgctggttttaggcttgctcccggaaagagggcagcatttgccatccccctccttttgccctaggagttgagcactttctgcagtacttaagagtgtccagggaagatgtgggagtcaggtgaatagttcccatcgccagtaaccccagagcgcctccccctgcgttgtttccttttaatgttagatccgccgcctgggtgcccatacttagctaaggcccctcagtttattttcctgaattgcgcttggagatcttttcctggggagctgatagccagacttctaggggcttgactgcttttcccagactaatctccttaaagacccgttaagcaggggagagacggtggagactggatgaactggacagtgggggtagggagaaagggagtggccgtgttcctgcggtccgctgggatccggcaggtccagggtgaaggagatggggctggagaggctgagcagtccgggttcgctgtccgccacttcggcgcggaatcagagcaggacttgctgagccctcctaccgctccctttccccctccccctctgtcttcccttctgtttccttttccctccccctggagctgtagcggcagcagcagcaggaagccgagccgggttgagcgactcggaggcgagcggaggagctggaatatggggagtcagcgaggacggtggggccaggagcccttgggagggcctacggagggagcggccccaggcgctttctagagcgtgagcggtgggggagcaggcgcagggtggcacgagcggaggcggggcccgggcgtggggcacggctggggaagctgccgcctccggccctgcccggctgcctccgccgcggccagtggctatggagcaggcgggcaccagacctgcggcgacagagcatccacggctccggcggcccatgccctggctgctgctactgcctctcctgctgctgttgctgctgctgctacctggccctgcggcctcccagctgcgatactctgtgccagaggagcaggcacccggcgcgctcgtgggcaacgtggctcgcgcgctggggcttgagctgcggcgcttggggccgggttgcttgcgcatcaaccatctgggtgcgcccagtccgcgctacctggagctggacctgacgagtggagcgctcttcgtcaacgagcgcattgatcgggaggcgctgtgtgagcagcggcctcgctgcctgctcagcttggaagtgctggcgcacaaccccgtggcggtgagcgccgttgaggtggaaatattggacatcaacgacaactcaccgcgtttcccgcggcccaactaccagcttcaggtaagcgaatcggtggcgcctggagcgcgctttcacatagagagtgcgcaggaccccgacgtgggcgccaactcagtacagacctacgagctcagccccagcgagcacttcgagctggaccttaagcccctgcaggagaacagtaaagtgcttgagctggtgctgcgtaagggcctagaccgggagcaggcagccttgcaccacctggttctcacagccgtggatgggggcatcccagcccgctcgggtacggcacagatctctgtgcgtgtcctggacactaacgacaactctcctgcctttgaccagtccacttatcgcgtccagctacgggaggactcacccccaggcacattggtggtgaagctgaatgcctcagacccggatgagggctccaatggtgagctcaggtactccttgagcagctacacgtcggaccgggagaggcagctcttcagcatagatgccagtaccggggaagtgcgagtaattggggggctggattatgaggaagcctcctcctaccagatctatgtgcaggcgactgaccggggtccagtgcccatggcaggtcactgcaaggtgctggtggacatcgtggacgtgaatgacaatgccccagaggtggtgctcacggacctgtatagcccagtgcctgagaatgctacacccaacaccattgtggccgttctcagtgtcaatgaccaagactcaggccccaaccggaaagtgagcctgggtctggaggccacactgcctttccgactgaatggctttggaaactcctatacactggtggtgagcggcccactggaccgagagcgggtggctgtctacaacatcacggtgacagccacagatgggggaataccgcagctcacatccctgcgtacactgaaggttgagatctctgacatcaatgacaatccaccaagcttcctggaggactcctattccatctacatacaggagaacaatttgccaggtgtgttgctctgtactgtgcaagccacagacccagatgaaaaggagaatgcagaggtgacctactcccttctggagagggagattcaagggctgccagtcacctcctatgtctccattaacagtgccagtggcagcctttatgctgtcaactcctttgactatgagaagtttcgggagttctttgtgactgtggaggctcaggacaaggggagcccaccactgagcagcactgtgactgccaacgtatatgtggtggacatgaatgaccatgcccctcacattctgtaccctacctcaaccaactcgtcagcagccttcgagatggtgcctcgaactgcccctgctggctacctggtcaccaaagtcatagctatggactcagactctgggcaaaatgcttggcttttttaccatctagcccagacttctgacctggacctctttaaggtagagctgcacacaggagaaattaggactaccaggaagatgggagatgagagtggtagcactttcaacctgaccgtggtggtccgagataatggagagccatcactatcagcctctgtggccattacagtagctgtggtggatagggtttccaaaatcctccctgacactcagaggcatgttaagagccctcggacatactctgaaattaccctttatctaataatagcattaagcacagtgtcttttatatttcttttgacaatcatcattttgagcatcatcaagtgctaccgctacactgcgtatggcactgcatgctgtggaggcttctgtggagtaagggaaaggtcccctgcagaactgtacaaacaagccaacaacaatattgatgccaggataccgcatggcctcaaagtgcagcctcacttcattgaagttcgagggaatggctccctcaccaagacctactgctacaaggcctgtctgacagcaggctcagggagtgacactttcatgttttacaatacaggggcccagacaggaccagggccttcgggagcccaagcagcagtgactgacagcaggaatctcacaggccaaagtggtcagaatgctgggaacctgattattctcaaaaatgaggctgtttctcaaaatgaggtgagacagtggtcagggggtcttctacaaactcatgcatttgttacacatcccccaatatcctgtgatttggctttattgagtcattaacagtgacaagagttatctggtaaactgagtatatatagtatccacaatttgatcataatctgctatttcctctctagaaaaatagcactaaagaattgttttatttttcattttcagaggcatgaagccttgtccataaaattgtttgagaagtgaggattagtcttaatatttaatgctaaaacacagatttgtagagaaacaggacaggccttggaatagggattatgttttagggagtaatgttatgagactcaaggagaaatggcctctgctgtatcatctacagggaaatttttcttttgaaatcctatatgagtgatgtttcttaaaaagctctgaggcctctaggggctatcatagtcaccactatctgctgtctctgtttatactctggactgtctacagtggaaattatctagttaatatttctggtacttgcactgaacctatgtgataggatcctctggaaatgcatgtcacaagtgataaagctgtagtatttagacatcatactgaagctaaagtttgctttggctgtatgatgtggcaactcttctgtagagggctgtcagagggagtggatgatggtgaggcagagagattaagtaccaatttgtctggttggtccagggaggtattagaatgagtggattaggggtgtggggggatggtgaagaccaagagaagctgggattagaaggaagagaagggaaaaagaattctcccaatagtcacctttcttggcatactctgaattcattgtaagaggatttccctgaatttagcttaaatgcagcctgtaatcttctgattttctgttgacagtttctatggttttgatgagatgtaaagtagccttttcaagtccttcatgtctttaagttaaatgacagtacttccaaagcatgcattcattttctggatctaaaatttgatttgctatagcttcaaaaggctggcttggaaagtggatggcttaccctacagtaaggtgtagaggcaggtgttagtatatgcactagttttgagatttaagtaggtataaggccagcttgttcattattatgaagaatgtacataaattattagaaagtagatgaatatgtgtgtgtgtttgtgttgtgtgttcgtctccatatgtatgcttgaaataacagagatatgctttgtgatacttaaaacttggatttcaaaagccaaaattttgtaccataaatagtgatgaattgttatctttccaaataactactttgtagaaagggcttttagagctactacacaatgtgtgaacaatatttgtctctcctctattttttgcaatatattttcattgacatattgctgtacatacatattgtatgtaatatccatattgttacatttcaagttcatggtaatcttgaggaatgtaatgcacaggcacaaaagttccattcctgattgagagtagatttttctcatggacatttcagatagatttattcatttatcagaagtgcctggtgttagtcaatgctgagaaaccatgggaggcagattgtagattaagaaaaatgggggaataaatcaaagagtttccagaagtctttagatcgtagcatttgaaagcacgtaaaagggtttagctttaaataaggttgctgtagacatttgcttaacaaattcttgtgaagccctttgggattggggtgggctacaggtggtgaagaggcatgaacaagtcaggccaggctcagctttgccaccagctgtaagccggaagctcagaggaaagacactgttaccctccctctcctgactcaaagcttggggcaatttgatacataaactatttctgtcttacactgacctgtatattaatatgtactttggtacacaaacatttaatctagggagaaaattatttcagaaagtgcttgcttttgggagattttgccaggagagtgcatgactttaataaaggcaaatttctgccaggcacttttggaaatccagtgaagaaccccaagatctacagctccagaaatttttgcagttatagggagagagtgtcacattgttacagtgtggcaagataggagcaaaagccactcagttctgaaagtcatcattgccagatcaacctgttaaattcccatgttgggctttctttttttcctacctagttactacagatggcaggagagtcctggggtacaattagtaccatgtgcctacattaaaagtagatgggaattagagaggaagagtaagggaatttgtactcactaaccaccctgctatatagatatatgtatatcatacatatacacatacatatatctcatattactgaatcttgaatattattcaagattattcaatatattgaatattataatattgaatacatatatgatttcattacctgcaagtcatgcgttaaatatttgttaacatctagcatatgaggaaataagctcagggaggttaggtaatctacacagccacactgctagtgttattttaagttgtatccatctgactccaaaaactttttttcaatactatgagtagacagaagttccaatgtttatattcccttttatatgggatattcaggcatttaagctatcactaattcacctagtcgtatatattaactgcttttggaaaaagagtaatttctggcatagaagcaggtaacaaatgggaatatcagtgagttactactatttttttatttttatttttttgagacagagtcttggcctgtcacccaggctggagtataggtgtgaatatggctcactgcagcctcgaccttctgggctcaagcaatcctcacacatcagcctcctgagtagcttggaccatagatgtgcgccaccgtgtctgactagtttttaggtgttttttttttttggaagagatgggggtctcactatgttgcacatgctgttagtatatttgtatttgtttatttgcttcactattggcaaaccctgttaagatcttttatttttattatttcactgatttttctcttgttgcttattaaacatcagcatttaaccccagactctaatctgttggtagattttacccccagtgagcttatttcataaatcacttgtgcagtgaggattctgaagtaactatttggcaatagggcagaatttctctttggaaatttctgaacttgatactgaatgttgttggcactcccttcagagtctccataaaaagaaaccaaattttttttttttttttttttttgagatggagtctcactctgttgccaggctggagtgcagtggcgtaatcccggctcactgcaacctccgcctcccaagttaaagtgattcttctgcctcagcctcctgagtagctgagattacaggcacgcgccaccacgcctggctaatttttgtatttttagtagagatggggtttcatcatgttgtccaggatggtctcgatctcttgaccttgtgatccacccgccttggcctcccaaagtgctgggattacagatgtgagccaccatgcccggcaaaggaaaccaaatcttaaggtagattctgtgcatttgtggtcgtggtgttgtgattgttaatgagtcactttgagtactctagtagatttgtccaacagtgtctcagtgggcccagctggcacaacatgtagaaattatgaaagagtagcagagatgaattaagtttgcattcactttcacttattttaaagcaatttgtagtcaccaaaccttcagttatttctgccactatgtgtgcatattcaccctaattccaggtatagtgacctgaaagagttaattcttctttcagtggcacctacttttatttcccccagcactgatttttctatctgatgactctatcctggaacagagtttacactcgttgtaaagtgacatagtagtgaatttataaaaattgcacaatggtcagaatagacaaagaaatcatatctatgagcttccactccagtttttcatcctctgatggtcactttataatgactggggctgttttagtttgcaaatttcatattggtcacaggactcttcttctgagaaaaagtttattttctttggtctgatgatacaataatttatttcaattacctctttcctcaatttttctacagactgctgagccagatggaattatggctgagctcttctctgtttctgtatcttgtacacattctgactgaagaagaaatctatttattgtagcttgaatgtcattggcctactgtttccttctgacccaggagtgagccatcacatgggcatctggtctaactcagaacactctgcagggacacagcctggcatattataggttgcctattggcatgctgtctacttgacagaatagcaaagtcagttctgggtacttgcttgttgcctaccaatttttgctctcaatgagaggtcagaataatgtcaatttgcaaatgtttgaggaaacattcctgtcaccaaacccagaggtttagctgaatatgatggcattttacaggtgtctttaaatgtggcttttacagaacttcacctggatcaatgttttgtgcatgtgataatacaactataaatttagcttattaatatgataatatttggagcagtataatctataaccatgacttcaaaaatcaaaggttaaaagtattcttttgcagtgttttaaatctgctaacctgaaaactatacaagggtttttctttcaagaattttaacttgacaaatgcaaaggaatatccaacattgcaaaggtaaagagaaatcttagttccttggcatataagcaccatcagttcctttctggccttccagggtcagaactctgggctccaaggaggtacaactgtgagtgagagagtagctgctgtgctagcaggctatgcatccagaactaaacagacctagcactttctgttgtactggaacccattaggtatgttctaaagttatgtttattttactttcctggtttgtaaattagcattttaaatgactacattcagaggaaagtattccacccagaattctcaaatgtattacctttgtgttttattttattttagtttttttgagacggagttttgctcttgttgcccaggctggagtgcaatggcatgatcttggctcactgcaacctctgcctccagggttcaagcgattctcctgcctcaacctcccgagtagctgagattacaggcatgcgccaccatgcctggctaattttgtatttttgggtttcaccatgttgttcaagctgctctcgaactcctgtctccaccttggcctcccaaagtgctgggattacaggtatgagccactgcgcccagccctcattttgatatactagaagaccaatatgcaacataatgattattttaaatgttatattcccttttgccttaatgcggaacagtctatgtatcccttttctgatgatttgtaacaaattaccacaagtaagttgtttaaaacaccacctatttgttatctcacagtcctgtaccatgtggctgagttgtccgctcaggtattctcaaggctgaaatgaacacagctgggctgtgttgtcctttgcaggctcttaggaagaatctactatcgagctcattcagattgttggcagaatccagttgtttggggactgagatctctgttttcctacttactattggcctggggtcactctcagttcctagagaactgaggactcaggactcttgtcccatggtctgctccatcttcatggctggcactggagaatcttccctcacatggaatccctcttatgcttcagatctctctgatttctgtctctgacctctagacccagatttaaagagctcatgtgattatgtcagtcccatccagatgatctccctttcttaaagccaactgtgctacatagcataatgtaatcatgggaataagatccatcacaatcacagtcttggagactattcagggtgtgcacaccaggatatagggatcttggggccatcttggaattctgcctatcagtttatatcaatgttcataaaatagcactatgcaaaatctgcagtggatatattcttaatacagtcctattaggaaggaaaaggagatattatatgcagtctcatgtcccagagggcaatttgttgatgtcttccacatggatttccatggtacgaagatagcatattatttcattgagtagttgtgtgagtttattaataaaatagggtattttaaacttattttactttaaatcttagaagaggtgattcatccttctgtagctcaaatattctatgtcataaatcacagataataccattacaagataaattaaatcttttttataattttaataggaactgaagtgtattcttattcttcagtaatactacatcacccatatggactacctaattgattttttccacatatggagttttgtgaccattattctaccaaaagactaacctttgaagcaataggacatattagagttcttcaccaatagaaagtaagcatagtcctgggaggtaccatctaagtattaaagaactaaataatcacagttatttcaactgtgattgaaattgtgatagtaatatatgtcttactgtgtcagatatatcagtagtcaacttttcaacttgaatttttccaagtttaatcaagttctggatgaaactcatgtacattttactacttttagttttgtattgttttaaatcaatatcctggaaactcagaagtaaaaaagagaaagaagaaaaatatatgtcatttcatgtaaatttatttaaaacacagacttttggcaaggcacagtggctcaagcctgtaatcccagcactttgggaggccgaggagggtggattgcctgaggtcaggtgttcaagaccagcctggccaacatggtgaaaccccatctctactaaaaattcaaaaattagccaggtacggtggcagatgcctgtaatcccagctactagggaggctggggaagaagaattgcttgaatccgggaggcagaggttgcagggagccaagatcgcgccactgcacaccagcctaaatgacagagtaagaccctatctcataaataaataaataaatataaataaaacacagacttttgtgttaaggggacctaaacatgactgtcagctgaactcagcaatcagacaagtaatttaatctctccaaagttcagatgtctcatttttgcaatttaagtacaataatgttgactttgcattatagttcatttatttaaacacattttaaaaacctcccagatgccagaagcctgctagactctgactatatagctacgcttttatgaatatctgaagatatgcatgtgtctaatgagcaaaacagatataatccctttcatagagtttactgtctgacaaagaaagaattaggatacatgcaacagtatgtaataaagtgcaaaatctagtactgtgtagctacttaaaacatattatatgctttcttcctttccttttccctgcctgatcttactgccataagaaatcttgtaactgtgattctgtcaaatgaatctaagaaggatgttgttgctgatggactagtatagaaaatagcagcatgacaaattaaatgtgtcattggggaagtgagattgtataatgaactgagtttcctggtcagtcctgctggaactgtgcctttcagcaaaatgagtttgatgatttcattccaaagatcaagttgcagcaattttcatcatgaatgttacccaatcatagaaaaattggcaacatttctcagcagatgttacagtctttctcaaaggaaggttctctcagctgacaagctaacgatagtgctcctgatggcgaggggagagacggtgatgatgactgattgataaaaagtattttagtcatatttccaggtttataaaatgatttgcaaacattttcttttgttccctctaacaccgctagtagataatggaaactcctttgatttggtctgtagataattttatgctatgttatatggaatatccacagcattttgtgaacttgaaaacaaaggaggaagcagcttgcatatgcatatcttgctagcagattggtagaatagagagagcagttagcatgtgaggaccattgaggtaaagtatcccagagttgtaactttttctgggccttgactttggctaattctctgcatgccaaatatcatgtagccatccagaaatctgtctgaatattgagatggtgatcatttctctcctgggtgttatgaagaaatgtgtttattaaatactttgcatcccttaaaggaactatatgaatgataggaataagaattattgacagttttgaatggtctattgatattactatggctttgtttctaccaaatatggtaagtataatgtagaggaaaatacaaaatacaacttttatcccccatttttttcattcaactatacctcaatattcagtgacagggccacctcaatctccgcccatgaaaacgcatctagaggagtgtcacaagtttttcacagtgacatttttgcttactgatacaagacagtgatggtgactgatgatgtcccagtgatttctgagtagcttctaaccagcacataactcccccaacagtctttaagtctttaggtgcccatattttcctctttgttctcccccttcagactgagagtttgtagagagagggcaacagatcttttcaatacacaactaatgcaaaatgtatcaggtttttcttggatttcagctactccctgttaaacaatcagagcttagtgaacagtgattcagtgaggagggaaagcactcaggaaggagcaggaacaagtacaagtttatgaaaaggattagctagcaaaacaaggtcaaactctgcaatagtttgttttcctctccctagtatccctcttcaatcagaaaagagactgttatcagttgctggtgttatgactgggcacatccgccctgggtcaaatatgctgcagtctgcaaagccagcagcagattgcagtcctctgcagtccagccaggccagcagaacttgtgtagccatgtgccctgttatagctgtaatactgaattgggaatgttcccttaatggggcacttgagggcaaaagcagtgaaagcttttcctttctcaaagcagactgttcttcccgtagtgttttaagaacacagacatgtattgggcaaggcaaagccaaaggtggcctttacaagattattaaatctggtcttccagggtatctaatctgtgtgaggaccctgatgaactaattttcttctaaagtgctatatatgtagatatcatcatagagttacacatgaaatggctcattcaatacttttttagatgcctggaaatatttaagggagtaactaatcaattagcagcattcctgggagaacattgtcttgtcattttaacagaaaactctctttgtgattttgcagccacgacagcccaaccctgactggcgttactctgcctccctgagagcaggcatgcacaggtatgtatttccctcctcattcactcagaagtaaccttaacttggtatggctcagataaactgcatctccataggccagaagcagctgtcaaaactaaaaagctttaggtactttgccaggaaaatgcaattattttgtccccatgtttattccttgaaagatcgcaaatggtcagtgccagatgcttatcaagtgctggcatataagagtcctctgtaaaatcacagaaacaggctgctatgtattttctcccatcaaaatttctacagggaagtaatttcaacctccttcatccctctctacctatgctttcttttcctcctttaaaaactgtaattaatactcatgctttgagacttgggtacattgtgcaatgtatacatacatgttgtctaccttgttttttttttaatctcacattggctattacatcctattaccctcaataattgattgctattgttgtttgtgttcacacctattagagcctcctcatctttcccatctgttgctatcttattgtcatcaatgacatggttcttcagaagatgagccatgtaaagggctccaaatctagcttactttaaattaacctagagtaacggtattagtctaagactcagattaaatataattttgctttctctactttgtctctctgacagtaattgattaactaccattatttctggaggtgatccagtatccatgccatggggccaaataaaagattcattatttgcgaatgtctttggaaaccaaatgggaaggaccaagaaacaaatgatcacaactatcaaaaggatttaattttaaagaagaaataatcttcaaacttaagcccctcaaaatatctgggcaactatcaagtgaatattcaccaaacttagatcagttcgtaaagagaaagcctacaaagtatgtgtagagttaatgtgaaattagttttagcccattaaaatgcattagattgaaataaattaacatactctcaagcattacaaatgagcagaaatcattacattgggtgctatttctgattcagaagcaatcagtgaagggctgaagattagtagttggcttggtaagatgtcacattggaacctgggtcataattttaggccagaaacattcatgcatataccagaatattaggtatcagaagaaattctttatatttattagagaccaacttgtgcttttgcctgcatctgagctgttggtggagacatgcaatgggtaaaagcatggtttacagtaccaactcttgaaaagtaccaaagctatgagttgtgccttaaaaactacatttgaaataaaacattaaaacataacttcctggactgggcgcggtggctcacacctgtaatcccagcactttgggaggccgaggtgggcagatcatgaggtcaagagatcgagaccatcctggacaacacggtgaaaccctgtctctactaaaaatacaaaaattagctgggcgtgatggcatgtgcctgtagttccagctactagggaggctgaggcaggagaatcgcttgaacccgggaggcggaagttgcagtgagccaagatcgagccactgcactccagcctggcgacagtgcgagactctgtctcagaagaataaataaatgaataaaataacataacttccttatcccattttcaaattgaaaaaaaaaagccaaatgtgctcctattcgggtttcaattaagatattatgagatttgagtagggtaagaaataaaataaaaattgaaattaaaatgccatttcttttttgcattgtaatacattgaacatattaaatgagttgtgaacctaaataatactaatctttttcgtatgtgtgcttgggtgttctcggtctttccagtcttggacatcatgtaactattctttaaaaaattctgctttgagctgagctggctccaggatagttacaccttcatgaatctgactgagcccacacaatttgctagtaggatccaggaacacttgaaggctgttaatatttggggaaaaaaaacagataattctagagtgtagacaaggggaagaatagtaaaaggtcagagtttaatgagtgaatttctactggatatgttgtttgaagtcaaagagtgagaaaacattgaacttatatgttgccttccctctaatagttcaagtttgcctgctctgttgcctcatataacccctttagtcagtagtctaaattttattttagaaatttaactttcaagataagcaaatgtctagtttaaaagggtcctctagtctaggtgtagtggctcatgcctgtaatcccagcactttgggagggtgaggcaggtggatcacttgaggtcaggagttcaagaccagcctggtcaatatggtgaaaacctgtctctactaaaaatacaaaaatgagccaggcatggtggcgggtgcctgtagtcccagctacttgggaggctgaggcaggagaattgcttgaacctgggaggcagaggttgcagtgagctgagatcgtgccactgtactccagcctgagtgacagagtgaggctttgtctcaaaaataaataaaataaaacaaaatgttcctctaattttgatgagggttttcttggacattttctcttaggatcccacttatttcttccttcctttcttccttcctcccttccatcattcattcattcattcattcattcatccaacaaatatttgagagattaatatgagttagtattagacatacataaatgaatactgcaccatgttctcttttcccttgaacagtttatgttctatctctgcttgcctctaaaggtctcccagtttgtatctcactcccagcaatgttttatgctgaattaatctcttctgagcggggatctgtgagtggtggtgatcaagtttctctagtctcaggaaatatagggtgggtcatctatgcataaaagatatagaaagagtaaaatagaaaataaggttaagaattaattagatagccaaattggaacaatactccaattatcagaaaatattttagtgtgttttcttctttagagtagagaacctaggaacaagagaacctgcaagagaggcttggaacttttgagaacaagccctcctcatctgcttcagtatcgagatgttaaaatggcttagtcctctgatgggcttcctgttagatttagtgagcgccacatggcgttaataaaaaacagaattgccataaagatagaacatgtgtgttcctggaatagtatagcaggcaataagtaagtcagcaatgcttctgcagtttatgcagggtgactgctcagcagtaattgcttcagttcaagcatgagcagaatgtgttagctgcagccctggcttcatagttgtaagcaatttctgagggtggaagaagagatgggaaagaatttatgatctaaccgttatctgggtctgtgtgtttattcagctctgtgcacctagaggaggctggcattctacgggctggtccaggagggcctgatcagcagtggccaacagtatccagtgcaacaccaggtaaagagctggggtctctccattctttcttggtttctggaaagtgatcagatgacctacttttgtaagatcaggaatgttgatggctctttttcttttatatttttgttattcccttttttccatacatacatgatttccttacatatatgattattttgattttatacctaatgctcttcaggagttgaaaaaggataacaaggaaagtgtgtgtgcacgcatgtgtgcatgtgtgtgtgtgtgtatgaagtttttggggtttgtttgtttgtttaaatcaggtacctttcaaatgcttaggtcatccaagccatgcagagaagatctggtggccttatgcacagagatgacactgttaacaaagatcttttggttgaagactatggaaacccacccaaagtagtaaggaaagaaagagaaaaagaaggaaagaaagaaaaaggaaggaaggaaggaagatggtttctcatggaagtggaaaattatcggaaccaaggcattgttttgagttcaagtcaaagtcaatctgcttctctctgcacatcaacaacattctgcagactgacttttagtgccttggcatgcatgttgccaaacatgaccgcctcacaatttcttagtttagagggataatagggactatttcctaatccaaactttcaggaaagagaacctgctaagttgtgtaaaaaacctaatggctgggtgagtataggaaaattgcttaaactcacatttgcttggtatccttattcttgccctatcactaaagcagggtcatgtaatagaaatatggctttggaggcccatcgctgtggcagttttcagaaagggaagattaagtgttggtagagaccacaaattgtgtctactctaatcctctattaatagaacatcatgatgataatagtagttactaattattaagccataatatgcctagacactgtgccaagtacattgtatgtgtggtctcatttattccttaagtcaagcttgcaagggatttattacatctattctacatatgagaaactggagaggcagagagattaagaaatgtacccaagttcacgtagcttgtaagtggcagagggtaggattcaaacccagatgtgtttagtttcaaatccaagtatatctagcacttatattcataacatggctggcttgcaataatccattcaaattcaaatacatatctacatacataacagatgacagaatgtgtgtgtaaaaggttttttcccaaaaataatcagatgcctttcaaattattaagtaacatgcagctaagggcccatttttactggcaactttaagggcattcgttgattctaatcagccaggatttgctatttatggatgttgcacaattcaactaaaagtcacatttgtccaaaaaatatacgagttgaagcaattcattagagagctaatattgccagattgcaaggggaaaaacataaaatagttcattgacaaatctgtaccctcagtgccaacgatggagtgaagaaatgatggaggaggaagtggttttagactgccaagtgttgcaggatgtggaggcatctgggaaggtgagaacttcccaaagaagccacgtgaaatcatgactttctaccttgcctttatttcagagtttttcttgctcttatggaggcattgtaggtcgacctggtaagccacaaactaactttgaatacattctccctcccattggtgatgctggttggtgtgtattcctaggcaaatgtggaataggaaccatgtattgatatttcatacatctggccaagtccctctttcagattcaaaaaatgttgagaacctatcttttttacagagatagagaaggggatctcccttgttccctttcttactgtcccagcccctcttgtataacccattttatccagaactgtgcctggctgctgatgcatgagtcacagtcttcatggactgtgctggatagagcttacatcttccaactactccatggcaacctaatcatacttttcaatacatacctctgcatcagtggtgtaaagttaaagggattctctgccttctccctgtccttctggtacttttaggtttttaggactcaatatatgttctgcactgcttggagggaatatggcataaagattaagattatgatttagagtcagatttgagttgaattctaatcccaagcttacttgctgggtgagcatagacaaactgcctgaattcatattttcttaattaccctttctgtaaattgggtgtagtaataataataacacctattttattgagttaccatgagaactaaaggagaaaaaaagaactgagcatagtgcttgacatatagttaataaatgtctaatcttttttttttgagacagagtctcgctctgtcccccaggctggagtccagtggcacgatatcggctcacagcaacctctgcctcctgggttcaagtgattctcctgcctcagcctcctgagtagctgagactacaggcgtgtgccaccaagcctggctaattttttgtgtttttagtaaagacggggtttcaccgtgttagccaggattgtctcaatctcctgacctcgtaatccgcctgcctcggtctcccaaagtgttgggattacaggcgtgagccaccgcgcctggcctaatcttcttactcttttttctttctggactacttttctgcaatctatgatatagtgttggctgatagcctggtggccagaattcagtagttctcatttgcaggcccagatatagaccctctgaggttatctgggtctatataatccagtcaccccaactgttcccctggaaatggagtgaggaggatttattagttgctgcctgaagaaaagggaaatgctccaaaaaatttggttgtttccagactcaaatagagcctgcctttcattgattctgttgcccttaaagcttcacggtgaagatgcagttgcttccaaaaggcttctttctggtgcctaagcctccttatacttgcttcagagccctttccgtgaaccagctgtgtattgctcttctcatcccaacacttgcaatggctgaataaaggaagtggggcctgccttacgctaatcctcgttcatatgtgtttcttaaagttatttttccttcactgatgaattccttttttttttttttttttttgagacagtctcgctctgtcgcccaggctggagtgcagtggcacgatctcagctcacaacaagctctgcctcccgggttcatgccactctcctgcctcagcctcctgagtagctgggactacaggcgcccgccaccactcccgtctaattttttgtatttttagtagagccggggtttcactgtgttagccaggatggtctcaatctcctgacctcgtgatccgcccacctcagcctcccaaagtgctgggattacaggcgtgagccactgcgcctggcctcactgatgaattcttttgctttttaaagaaactgttcatttattttcacagtctgcaaaagcctaagataaagatgccacactctgaaaggatcaacaagggcatcaccaagtaatgttttctgcaggataaacaagtcaggcattaaattggttaatcctgattactggcccctttctctagcctcccctctgtgtgagcagacccggaccacaggctttcttatttcctttcagcttcccttgagactgagcagagagagaaaattagctaaatcaggaatgcagggaatacagttgcagcctcttcttcagatggaggaatgcgttttggggggagggacattaaagggccagtcgctcatgttacagctctttttaacttcatgagtactaatgccctgaagaggttttaatgaatgccctcttgtgatcagttcctagggcaatcccaggttataaaaggactgcccctgcctgtgagggaactggcctggcttcagtgggccaggctgctttgttatctgttattggtttttccagctcctctttctacatttcaagggatctcaggccttacctaaggcaacagtacattagttttagagtgggagatgctcacagttttcagaagagttcagaaagtttcaaaacacacagcactgcagaagataacattatagcttctcaagaccccaggggatctgggactaaacagtgaaagattaattaggtagcggaagccactaaggcagtgagtcttagttagagaactttggtttagacaatggttctcaaaggggcagcaacaccaacaatacccggaaacttgttagaaatgcaaattcttaggccctatcctagactaatgaatcagaaattctcaggatggaggctgggtgtggtcgctcatgcctgtaattccagcactttgggaggccaaggcaggcagatcacttgaggtcatgagttcgagaccagcctggtcaacatggcgaaaccccatctctactaaagttacaaaaatgagctgggcgtggtggcaggtgcctgtaatcccagctactcgggaggctgaggcaggagaattgcttgaactcgggaggtggaggttgcagtgagctgagattgcaccactgcactccagcctgggtgacagagtgagactccatctcaaaaaaaaaaaaaataataaataaagaaagaaagacattctcaggaatgggacccggcagtctatgttttaacaagccttctatgtgataccaatgtactgtgaagttttaagaactggtctaaggtaaatattcctgaggttgtcttatatcattacagggtcagaatgcatgcaaggaagccatctgtttatggttcttgtgagaagcagggggcctttccccatgcccgagagataattgttaagagctcaagcttgggagtcagtgaccctttctgaattctacctctgccactcagtaattgtatgttcctgggaccattacttaactttcctgattctcagtttctttctctataaaatggggagaatagtggtgtctaccttatagggttcttggaagaattagatgagataatgcacacatattgcagaatctgaagaacaatcagggtttagtaaatagtagctatttttaaatgatttttccaggtatgagtctatcctacagcttcaaaatttagacccaggttgttctgagtattctctgtgggaagaatctgctatagagaagatttttttaaagtgcctgtctctttgtttccttaggggattgcttttgccctgatttgccacatctctttactctgtggaaaatggacagtttatgtgccctagttttatatggggatttatattcttaattgtctcaaggattcttacctgtctgacaaaaccaactccccatggaaagactccatggagactccatctctgatccttccccagaaagaaagcatgattcttaagttttttagaatctgtttaggagcactgtcaacatgaatttttctatttcatgagtgagtgcagcctcgggccttgttggagaatttagaaagcatgctgttccactaacctgttcaacctcaacttctgccgttgtcatagcaatgacagtcctgggaggtgtgtgcatatccttattaggaaaaaaaaatgagatcagggatctatgtgagtggggcagctcccgcctgtgagtatccttcgctgtcacctgccatctgacagcccaggagtgccagcttggcttggctttctctacccgaggaaagtaagtccttttaagatgcacttttactttctggggttgtgaaactcattgtgtttgccagagttctcttcgcagcttatgtaaagaatttgtttgttttggattgacctgaagggaggaagcaagggtgtgggaaggggaattagcatcccctacctaggagaagccatgaagcttacttaagtctctgctggctccatccattcatgactttcttcatcttcttcttgggaaaacactctgtaccttccacttttaatggtcatgtaaataaaagactagaatggagatgtcctggttttctgaaattaaacatttttgtttatgaatagactctaagataattctttccctagacgctctgtattttcttggacctctcatttgccccatagtaattattctaggattggtggcctgggcagaatacagtcatggttaagaccatgatacataatagaagaatttcttccgtaacagtagccccaaacagagatcacgtgtctcctgaaacctatccagtctcatgtgcactcagatgtacgatcctggatataacattttagagggtgtagtgaggagaatagaacaacactgttctcttaggctgcagtttccttcaagccccacgatggagagaagcaggctaatgcagggtaaggaaatagagacttattatagtttcttcagttatcattgattcctttaatatgccagctacattgaggcaatacagtctggcctctgaaaaccttgtcaggagaaacaacttttgaatatatcttagaaaaataagacactttatcccttcttttgtttaagagtgttgcataaaacaggagagtttctgaattaccctcccttctagctttctttatacaccattctttgtagctgaagttttaagccccttgtcaaaagggagattcaagtttctgctggggacatctcagtgtcacaaagggccaaggaagtagggtctcaccaactttgccacctgactcagctcaaaggtgataggtcacctgtgtgactgagagctttgtgggaaagatgatatggagggtggagagtctgcacttcactctgtgggaaaaattgctgaggttgtttagaattgttaggcttggaactcctcctgggaggtgcttgaacaagaaagacctgcttataacctgagttgagggcagaggaggaagatagtttgtaattcctttacgttttgtggctccggcaagccctgtcctcagcctcactgacacaagtaaactaaaaatgaaagtctgtcctagtgacagcaagggtctttcatggcaatattttaaaagaaactctgcccagatttcaaaggaacgtgaaaattttatcttcagaggcagtcagctttgcagttgaaaaggccattgcctaatctggagaaacatattcagttcaagcactggctagagactagaggcccccaggaaagggccataagattggtcactgccaggaagcctgtcaatgagtgtgtggactggagaggaatctttctctgcctcagcacttggagtctccgttattcacaatcagaaaaagagggagagcagagatagatgacattccacgtttttctcggtgagaccaagagcttcctcagcaacagccctgcctgaaattgtctatctccaagggcgtgggctaggcaaaggatgggagaagtcagtcctgaagatggtaatacttaaaggaaataagggggacaaaggatgcttgtgctactattgaaacaggaaattgagagctctgtagaagtcagactcaagaggcataataatagaaagttagggtatgaaaaggtgacttttaagaaccaaatgtggacccgaaagagaacaaagagaagtttattgtaactagcgttgtattccttgtctgctggataccaaacaatgtaccccgggtcttgagattatcgatgccattgtctgtaaaaaaccaaccaaacaaactttaaaaataagtaaagcctgccctgtacagaaaatctaataaagcaaatttgttggtgatgttccaagaaggttcaccagcttgggctttcaaccagcattgacccaatcttgtgtccagagctgttgctgtaggtggtatcatgtatcaagctgaatagtgaggtgacattccccaagtcttctctcttgtcttttttgactgtgcatcatagatactgtattacccaagaacacacacctgttcgatctcttttcctataatcacctggagtcagatgaataccgtaaaggtctgtggtaagactagaagcctcagccagtatgaatgatttacattagatgcacaccaagctgctttcggagagtccagatttatggggataagagcatcactaggtatatcaacagccctagggtggatacctttgagcctgtaaatttggctctgtgttggacgatgaaccatggaatacagaagaagctcccttctctcagctaaagcctattagcaaaaatagagccctgaggacattgtattttaagtgtatgttccagtgagtgggtcgttgctgggtcaagttttataagtctttaaatcccatactgttgcctcctggactgtagaaatagtctcttagaacaagagaaaggaagacaatagctaccatttattgagaactgtgataagcactttacatatgttgcatacttaactttgagagaagtacattattattcccatgtttcagataaaaaaattaaagctcataagaattaagtggctttcttacattcacacagctagtaaaaatgttttttgctcaccattgtattcccattgtcaagcaggatgcctagcacacaatgatgctcaataaattttgttaaattcattaataaatgcagtggtaaaggcagtatttgaactcatgtctgcttgctgctgaactctatacacttaacacattactattatcttgtcccgcatgatacatgaagggaatagcttggtaacttggaaaagactatttactgtctgagttctaggccaactgtagggtgtctgtatttatttcccattatgctataacaaattaaccataaacttcatggcttaaaacaacacaatgtattatcttacagttctggaagtcagaagtccacagtgagtttcactggctaaaatcaaggtgtgttcttgccactatataacaaggatccactttcctttagtttccaataacaggctccttatttctacctgagccctcactggcagcacctttaatgccatatttgtaataacaatctgttcatgacaatttaggtttgctcctcacttttttctgagtcctctctagtagagccattaatatgcatattgctactagcagcctgttcaaggtaatgtaggctctttctatcatgctcttcaaaattcttctagactctgcccatttcccaatctcaaggccacttccgcatttttaggcatttataacggcagaaccgcacttccagataccaaaatctgtattagtttcctagggctgccataacaaattaacacaaaatcccttttgccatgtaacataacatattcacaagttctaaaattagaatgcagtcattttggtggggccattattctgcctaccacccggtctttcatgttcaggcagaggtggctctgtgtgtgtgtgtgtgtgtgtgtgtgtgtgtgtgtgtaagttaatttcagtagagaatgagctagagtagagaaagagaattaaggtgagatgtgtcatggaagaacagtgactgatgatgctaactttgctcaatcaagaagtgtgatccatttaaatcatgctttcagtgatctatccaatcagataaactactctcccttcctgggaagagtaaggaaggaagtagagctaaagatgaaagttcttttcgtagcacatccctgcaaaggatgggagtattgttttggtgggcattcccttttctaagagcaaagatggaaatgtggagagaggagaaaaatggttcccattacattattgtgttctggacttagagatattgttctgccccaggtctaagaatattgttccaagagttgggagcaggcagcagaggacagtactctttagatcacccagaggccaatctgtaaggattcaatcctggggcatggtagctaatggaaaagtcactgtcacaagtgatgccaggagatggggcaacacatattgcctgccttgtatgcatctagcgtctgtgtctaagtgaaagcagattatatccagaacttccctggaaaatagaagaaagagcctgattggtgtgtatgtgtgtgttaggggttgaggggtgggtaatgttcctgccagtattcgtaaatcccacctgcttttcctgtgatgcttcctgtgttggggataggagggtgggatggttcagggtcaattttatggatccatatgtatctaaggatgtgtttgttttttgggaacattttgtataacaaccagtttcactctagctccctccttgatattctaaacaagctggatatctccaaagcttaggccctctccatacttacagcagctctgactggagattaaatcaccccttatactgctgacaatgattaggccatgggacccatgaaagagcctccccagagtccagcatcccctgtgggctccgtgtgtcatcaagatgtcaatccaactgctgttcctgcagtctgcaatcagcagggctatgtttattcagcggtcagtgtcacatcaatttccttctgttgcaacaagtataaatggattctaaatatttgcctttgggaaatttctttagagggaaactcactaaagctaatttttttagctttttggtatgttctctctgaatctggggatttagatatataaattagcttctttggtcttttcttgcccagggtcacaaccttgcctccaggataataccttctaagtgtttgtgatttgaagggcactacgaagatcctcacaaaaactacctcccagccgggtccctgaaactccatcattaaccaccttcatcagcatttctcttttaaaatccttattcattcctgttctccttctttctttctcacacacacacacacacacacacacacacacacacacacacacacacggggagagagagacagagagagagagagatagagaagtgaagtatatagtatcctttctagggatgcttttcttggcttggctccaatagagaattttgttgggaccctctatatatagtcgtgtaccaaataatgacactttggttaacaatggaccacatatgtgacagctgtcccataagattgtaataccatatttttactgtaccttttctatgtttagatacacaaatacttgccattatattacaattgcgcagtattttgtacagtaacatgctgtgcaggtttgtagcctaggagcaataggctataccatatagcctaggtatgtagtaggctatgccatctaggtttgtgtaagtacgctctatgatgtccatacaacaaaaatgcctagtgatgcatttctcagaacatatccccattgttaagtgatacatgactgtagtcatcatcaaacatttattaagcacttaggtcaggccaggctctgttctaggtgatgcagatataatattaaatataacacagtcctgcccttataaatctaatggtgaagggagaaatgtaaagaaatatgatggaaatattacattgtcatgtgataagggcgacaataatgccctacgtaggtagggtcaacgaaggggaaggaagctgggacaaaccaccagggcctgttggtccagaatgggacccagggtctgtctatgttataatcaattcaaaccctaggtaaataaggtaagctaggctgcctttcttgagacagtccccagattgttttcacagggcccaaacactctcagcaaccatgaacagtggatgttgtgggacctcagaagatggaattggaaattcaggggactaagtcagagattatttgacatttaatactggatattgaggccgggcgcagtggctcacacctgtgatcccagcactttgggaggctgaggcgggtggattgcctgaacccaggagtttgagaacagcctgggcaacatggcaaaaccccatctctacaaaaaaaatataaaaattagccgggtgtggtggcatgcacttgtagtctcagctacttgggaggctgaggcacgagagtcacttgaacctggaaggtggaggttgcagtgagctgagatcacactactgcactccagcctgggtgacagaatgagaccctgtctcaaaaaaaaatttaaaatactgggtattgcaggatggcaagtaggatgtggagaggaagagaattccaggcaaaggaaacaatgcgtgcatgcaaaaacaaaatacaaaaaactgaattgtgtagtctgggttaataagatgagtgcatttgatggatgtggtagaataaagagatgttaggaaatgagatcagaaatgtagactggaatcagattttgtaggaccttaaacatcctgctaaataatttgtagtttcatttgttggccatggagacccactagaaggttagttggtttgtttatatttaggaaagaagattcttttaagtttccttaactctactgaattttcaaaaatcaacctacagcaatccaaacttatctgtggagatacattccaagaccctcagtggatgcctgaaacctcatttagtactgacctttatatacattatgttctttcataggtgcacctatgataaagtttaatttataaattaggcacaatactcttgtgctttggggccagtattaagtaaaataagggtacttgaatacaagccctttgataccaaaacagccagtcggataccaagacactttctaagtgaactaacaggtgagtagtgtagacggcatggataggtcggacagagggatgattcacgtactgggcaggataaagcgggatggctcgagatttcatcacattactcagaacagcttgcaatttaaaacttatgaattgtttatttttgaaatttttcatttaatattttcagactaaggttgactgtgggtaactgaagcctcagaaatcaaacctcaaataaggggcgatcactgtactgaataatatgtcaagatgagctatgagcttttaacttagtgtttttcttctcccaaaccaaatattggaaactttggagtgtttagaaaaggagaatcgaaaagggaagtaaatgcagcattttttttaattgttaaataaagggctgggcttggaaatgttcttaggtaatcctggtggatttggtatatcatgtctgagaaaatgtggagagtgaagggcaggtttaaaatttgtctcatgttagtttctgaagggagatagcctggcattgcacagtgcctcacatttctatcgtatcacttaataattgtgcaacctgtgcttcagatttatcaatgtataaaagaggagagaccataggctgttgtaagtattaaatgacataatgcacgcaaaatgcttagaaccatgcttagttcatggtagccactcaaaaatgtcgtcagaactattactactcagtttaatgctcctagcacttaacacagtgcttggcacacagtaaagaggattcaagatgtttttgctagattacatggaatggtatggaagtgtgcagggtggtgtagagggttctcccattatcttgccttccttatactgcaatgtgctgacagcacctccattttataccctcaatgcaaggatatcactacttgtctagaaatggttgctcaaggctgagaagtgacagcaacacagagcctgggattgctgccaaatttcaagaagcacagattgtaacaaagtaaggggggagggtagagaagaaaagtttgaaaacccaaccaaagtcagaagccattttgttgtcggctgaaataatgcctcatagagtttcaggtggggcaggcagtgtgaaaactttgggaatagtcagtgtcaagttgtggtgctaagggaggaacccagtagtgctcaggcctgggcaagtctggcttcttggggcccagcatttagaaaggccctgtgtgttttgatattatgctgtcactatcttgaagttcttgataatttgttaacaagggccgcctccccccattttcatttggcaaatttcactggttcctgcaaattatgtagttaatcctgggtgcaggctagtttttgaaccatgttgggctagtattcttctgaacctctatctctttgatttaattacagaagaaacaaaagtcataacaaattatatctgtgcaggactaaaataaaatgagtagtgcctcactccctacatccaatcatgctttccaaaagtaaccactaccaataatttagcgtgcatcttcagaattctttatatgcctacattttaatgtatttttaaataaaatagaattacattgttgaagtaaatattaaaaaatatagcatttttgcatagaaatatttatttccctcaatcccactcccctttggtgaagcaaccactgttaacaattttgtgtgtatcctccaatatttttttgaaattaatgaactttactttttagagcagttttaggttcacaggaaagttgagtagaaagtgcagagttctcatgcactcctgctctcccacatacacaatgcccccacacccccgccacagtgacatcctgcccagagtggtacattcatgacaattgatgaaactatattgacatcattattgaaactatcattaccacccaacttccatgtttactttagggttcactcttccaaatatttcttgcatcacttaacaatggggatacactgagaaatgtgtctttaggcagttttttcgttgtacaaatatcatagaatgtacttacataaacctagatgatatagcatactacacacttaggctctatcgtatggcctatttctcctaggctacaaacctgtatatcatgttactatactgaatactgtaggcaatttttacacaatgataagtatttgtgtatctcaacatacctaaacgcagaaaaagtacaataaaaatacattattataatcttacaggacaactgtcatatgtgtggtccgttgttgactgaaacatgattatggggcgcatgactatatagagattttcaaaaagcaaaatgggataatgcaatatgtattattatacagcttgtgtgtgtgtgtgtgtgtgtgtgtgtgtatgttaacaaacacctttctacgtcagtacatatagatttgccacaatcttcttgagtaaggatatagcactatgttgtatacctatattataatttatccaatttgctgttggtatctatgttttctaaacaatacaatatacattcttatacatatttcttatgcatgcttgctagtatttatacaggataaatttcaagaagtagaattacagaatcataggatataaaaatatcaaattggcaaattggcattcacgtacctgtggttggactgcacttgttacatacttccctctgagccttccatccccacctcgagctagtgctatatgtcacttaactcagtgacatcatcatcaacagacttagcctctgcagttgaaaatgctagagcaaacagaggagaaaatttacttgtgaatcataatagctaacctgtactgaacagttaagccatgtgccaagtattattctaagcactttacaagtattaactcctttaatctgtataaccacacccagaaatttgtgcattattatactcattttactgctaagaaaactgacacccataggattaaatcagatcacacatttagtaagggcaccaggatctgaagcaggattgtttgacttctgagtctgtgctcttaaccactgcacacaccgtctctagaaagtttaatgccatctttatgccaaagtttatctacctggtttatcctttaacactattattgtatttattcatttacttgtcttttcctcccactgtgctgtaactctttgagaacagggtacttgtcctaatattattcatatttatatccctaattcctaatttaatgtctaatttattgtaaataagttttttttttttgagacagagttttgctcttgttgcccaggctggagtgcaatggcacaatctcagctcactgcaacctctgcctcctgggttcaagtgattctcctgcctcagcctcccaagtagctgggattacaagcttgcaccaccacgctaggctaattttgtatttttagaagagacacagtttcactatgttggtcaggctggtctggaacccctgacctcaggtgatctgcctgccttggcctcccaaagtgctggattactggtgtgagccacatgcctggccttgtaaataataagtttagttgaataaataacaatgcctccgggaggtagctattatatccattttacagatgaagaaactgtaagtcaatgttaatcaaatagtatcctagaaaatagtagaaagcagaatgctggagctgagatttgaacccaagacttttgatacttcgtccagtgtgctttccaccatgcctaagtagtctccttcacttcctccttcagagggctatggagagtaacctagcaaccatttctaagctggaaaatgtcacagccggaagtcttcagtcccctagaaggaaaagagcctgatggggagagggtccttggaaaagagaatttctggaagtactacatttgagaataggtggttaaagtgggagttggattagtaaaggaatactgcatagtagtaatacccattctttatttcagaatttcttcatgacagacattgatctgtgtgatttataagccttgtctctttttaatgttcacaatcccattagatggttattgttatctttgttttgcatatgaaagaatgggagctaagaggccaagtaccttgcctcttattcgttcaacgaataagtggtgaagcagattccaactcaagtctatgttacccaagaacctacattttaagcattttgttaccccctggatatgacagccaatgaagagggggtattttgagaagagactataaagggaaattgccttccctacatcctgggggaccttatcaaccaggaaacaaggtagagaaaactgtgcagcctgagccctgctgggttgcggggggctcacagaaagaagaaatgtgatttttttttagctaactacggagaccagccattccaatgtttgaatctgggttcgcagcacatgatgtctttatactcttaacctagaaatggcagagttattttgggcacaaagcaagagctgtggctttaaaaatatgccaagtgtatttatctcttccgctccaagattactgaaaattagcccagctgtagcttgggacaccaaacagccaaaaaatcttcttccagctcaactcattccacccaaagagggtgaaatacccaggagtagcagctctagcggcctctgggtagtggtattagattggcctccccattgctaagcctgacatccaatcacacacacaccactctcccagctgctctgtagatcacaatgctaggcctgtgaatggagctcaactccgtctcttccctcatccccaaggcttcacaagaagtaaacaaaacaaacaaaaactatttgattattgagccaaggagtcaatgtgagaatagtttttcaccttcattatcaaatgcctgtgtggagctgaatgtggtggctgacacctgtgatcctagcactttggggaggcagaggtgggaatattgcttgaggccaggagttcaagaccagcttgggcaacacagcaaggccctatctctctctctgtctctctctgtctctctctctctctctctctctctctctctctctatatatatatatatatatatatatatttttttttttttttttttttttgagacagagttttgctcttgttgcccaagctggagtgcaatggtaagatctcggctcactgcaacctccttctccagggttcaagtgattctcatgcctcaaactcccgagtagctgggattacaggtgcctgccaccatgcccagctaatttttgtatttttagtagagacagggtttcaccatgttgggcaggctggtctcgaactcctgacctcaggtgatccacctgcctctgcctcccaaagtgctgggattacaggcatgagccactgtgcctggcccctatctctgtatattaaaaaaaaaaaatcttagccaggcatagtggcgcacacctgtattcctagctactcagaaggctgaggtgggaggatcacttgagtccaggagatccagtctggcagtcagccatgacctcaccattgtactccaacctgggcaacagatatagacgctgtctctaaaaaaaaaaatcctgtgtgatttaggacaaattatcttgctgtaatttaagccttcatattccttttttataaaataaatatgctttaaatatgtatttagatatacacttataataatagctttaattaattgtaattaaatcatttaaaattaaatacatgcaaaataccccataaactgtctaatccataataagcaatcaatagtccttaaacaaatgaatcttctgttgctctgatcttaataagtaaaatttaacgagtttttactttgcaccatgcacttatgctatgtgctgtataaggatagttacatttaatctataaatcaaccctatggggcgggcactcttatgaactttttttacggatgaaaactgaggcccagagatatgaaataatttgccaaacatcaccataatttacatgatgtagccaggtttaagcctactattctgattacagagcctaagatcctacagagaacagggagtatatttttacattcccttgtttccatggaaaagtctttccactgtcaattgaaggactaagcagcagcggggaagtgctggaaatgctagcccaggtgggcttagctttctccctctctctctgatcctggacaggatttgggtttcagaccacgattctcctgtgttttgtgggctgtgattactcagattaggtttgcccaattcataaaggactggcgggggttgggggtgaaggtgtgggagaaggcggagcttgtccagtcggtccaacaaaccccacagatggcgaaatagggggcggggaaggagcttgagatattttacaacctgggctgtttcagtggttgatggcggatggtttttgccttttggtcagcctgagtatatactatcattctacaatcggccaaattctgacagagagggagacagagagagaggttgattaaattgatgcccaaaaccaagaaggagcaaagaaatcggggctgtttgaaaaagactgcagtggctgacttgggtggtgagcggaaataaggaggagggagaggcggggtgtctctgcgcggaaagcctggaagttcacttgcaaacacagaatctgcacagccttcggtgccctgactctttcctgggcatccagaggcagcagcagccgccagcgccaaagaacgagcagtccaggggctgggccggaaacggctataatcatttaatagcctttgccggctgcactgacttagcagagtgggcggtaggcaggctccagagtgctgtctggcaagatagtccccggctttaatcaaaatgatgggttttctggaagctctttattaacctcagcactgaaatcccagagctggtaacaaagggatgaatggggagcaaaggggcggggccgaaacctggaggccgggctgcatccgcaccccttcccccacctccactcctttcaactcattctggcttagggctcctgctggcatctctgtgcctcccaaatagtagtaacaaaacaggcaataaccataataattggcacatttgtataacgctttagcattttcaaaggatgaccttgttatacagctcaggatctgagtctcctagctggagtcagactccctagatttgagtcccaggatccaccagttagtgaccatgtgaccattagtccttagtcccctcatctataaaacagacacataacacagacagagatactagaaatgtctacttcatagggctcttgtcaggaccaaaacctatacgacgtgcagatttgtttaactctgttgcacacacataggaagggcacagtaaatgttaactacatcgacaaccctgtgatgtagacaggaaggggatcatctccattttatggatgaggaaactgaggctcagagatatttatgtaaatggcccaggactatgcactagtgagagaaccagggcaagtcctcaagaacagaaagagaacaaagcaagatgaagagaagatcagaaaagtgaacaccctccaacaccctccagcacatgcccctctgagagctttcctgaaaatagtatccttggtcaaaatgagtttatgttctattagggaaagtcagtgtaaatcagaaaagccctcctggccttaacagaacagttccaaatgcagatgagggtgagtttaacaggcctggcatttgcttcacaatcttctggccctttcctggcatttgccttggcaaagactctgacctgatcaatcctagtccctgaggctcaactccatcaactcaggcagccagggttagtttagcatgaaagaggaaagctggaaattttgccaaaaagattcctgggcagtgcctaagggaagtgcccaaattggattataggattacatgaagtggccagctacttccagagggcagggttttttgtttgtttgctctgtcacccaggctggagtgcagtggtgcaatctcagctcactgaaacctccgcctcccgggttcgagtgattcttatgcctcagcctcccaagtagatgaaattacaggcgtgcaccaccacagtctcgctaatttttatagttttagtagagatggggtttcaccatgttccctaggctggtcttgaactcctggcttcaagtgatccacctgcctcagactcccaaagtgctgggattttagatgtgagccaccattcccggccccagagggcagtttttaaagtagaagtgaagatctgtatgcatttattaaaatatatgttgttctgattttaaaatatatccctaccaattgtgaagatatcggctaatccaataaaaaagcaaaaccatattttgtataattatggtcgtattctgttaaataaacttttaaatcctattgggttgtaatctgtagtctgggaagggctctgcctaacgattcagacccctaccagatttatatgtgtctgaaatcctccttctagcctcttaacaggcccattcatttgggtcttgactgcatcctcagtcttgtctttgcctgagggtgagctaggaccctgggagcataagggaggggacttgccggagatcctagaagggaaaggaggcagcactgaaagaagaaacatttccttgattgatcatttgctgatactggcccctggttggggttaggggtagaaatgtgcttcttccgttttcatcttcttcaaaagggagtatctccatgattctgccccaaaggcatgacattttataggcaaagccagccaagtgtcttgagtgctcttaaccaaaaggaattcagattaggaggtcagtcagtgtttgtcagatccttaagcttttgttttactggaatgagtcacagtctacatgctgctgagctctcagagatgtttgttttatacaacaaccagaacaggtgaggcacagtggtctgtgagggactggagagaccacaccttgttctgctctgcggaagctggacatgtggaggaggcacctgactagatctctgcctcctggagtttaggctgagtcatatagaaccaggaagctcagtgacatgttaaagtggattaactcttggcagtcctgctgtgaggggctccctctgccaatacacacagccattaatgtcctttaactgtgcaagatgaacatatctctgtgttctgcatctccagatgacagtgcttaggcctcatgcagagtcctggttatggttgaagaaaaatttccattttgggctctgagggcaactaaaggactgtggagtggtgctgaaacccagttttaggtgccgaatcagaggtttttaaatacatttctctcttttgtctcagtctcttagagacaggacctgtattttaaaggtaaacaggcagattctggctgagctcaattgcagatttgattaacttagatagatcaaagtcattagtctcagagaaaaaatttgtttctcatccctaaagtgctattgtgtcagctctgccagggtgtaaggaaaagggtttggaagagagaagaaaatttcttaccctctctcgtcactgcctgctgtaaatttgcagtatcattatcttggtctcctaagccctgagagctgcattatatataattgcccatatgtgataccatttactgaattcttgcattgtgctaaggatcaagcttagtactttacatgcattacatcattgtctttagggaccccaaaagtgcctcattggagagttgtttggtctgctaaagagtgggtaccactttcacttctcacatcagtcctttcattcattcatccagcaagtatttactaaacacctgttatgggccaggaattgtgctaggcactggtgatacattggtgaataaacagatacattttttgcctttgtgaatcttacagtggtagagaataataggccaagggggtgctgcttggctaggaatgtcatagaatgcctttccaaggaggttacatttaatacagacttgaagagtgaggagtcatgctaagaatggatgagaggctcacgcctgtaatcccagcactttgggaggccgagacgggcggatcatgaggtcaggagatcgagaccatcctggctaacacggtgaaaccccgtctctactaaaaatacaaaaattagccgggcatggtggcgcgtgcctgtagtcccagctacacaggaggctgaggcaggagaatggcgtgaacccgggaggcggagcttgcagtgagtcgagatcgcgccactgcactccagcctgggcgacagagcgaaactccgtctcaaaaaaaaaaaaaaaaaaaaaaaaaaaaaagaatggatgagaaatcattcaagacaaaagcaaaccagatgtgtaaagatcctgaggcaaaaacaactccaaggagccaggtatggtggcctgtagtcccagccacttgggaggctgagacaggagggtcgattgagtccaggagtttgaggttacatcaagcaatgattgcaccactgcacttcagcctggttgacagagtgagaacctatctctaacaaacaacaataaaaaaacaattccaaagagtgtttgaggatctgaaagaaggcctgtatggttggagtataatagtaagagggagatttgtagatgagagtggagaagaaataaaaatcagattattgaagggacttatgtatcatggtaaggagttttttttttttttctcaaggcagtagaaagcttaagcagaggagtgatataatctgatttatatttttaaaagagtttgctatatgtatgttatgcctcatttttttttaaattttttatttttagatggagtcttgctctgttgcccaggctggactgcagtggcacgatctcagctcactgcaagctccacttcccgggttcatgccattctcctgcctcagcctcctgagtagctgggactataggcgcccaccaccacgcccggctaagttttttctattttttagtagagacgcggtttcactgtgttagccaggatggtctcaatctcctgacctcgagatctgcctgtctcggcctcccaaagtgctgggattacatgtgtgagccaccgcgcctggctgttatacatcagtttttaaagagagacattaagaaataaagatgactctggctactgtgtggagggttggagagaagcaaaagtggaagcagactgaataaggagactattgctgcaattcatataagagatgatggtgtcctgaaagagtggtggcagtgaaaattgggagaagaggacagagtcaagatatatttaggaggcagaaatgacaggtcttgatgatgtattataaatggagaatgaagaatagaatagagaaaaatgaataattagctttgaactttctggcttgagaaatggggtaaatggggtgtaatttactgaaactggaaagatttagaaaggaatagattcgaggaatcaagagtttgatttcagatttcttcagtttgggatgcccatgagatttccaactggggataccagataggcagttatacatgagattggagcacagagagatgtgggcttaaaatataagtctgcatctcatcagcttattcatatggtatttatatctatggatatggctgagatcccaaaaggagagagtgaagagaaaatagagaagagagtctagggccaaacccaaggaagcttcaacacacagatgaggagactgacaaaggaaactgtcaaagaacagtcagagagaaaggtcaggagaatgttttgatggtgggggccagaatatgctgtcccaaaataagaaggattgttgagctgaaggcaagttaaaagaagcagatacaggctgggtgcagtgggctcatgcctgtaatcttagcattttgggaggctaaagtggacagattgcctgagctcaggagttcgagaccagcctgggcaacatgatggaacaccatctctactaaaatacaaaaaaaaaaaaaaaaaaaaaaattagccaggcatggtggcatgtgcctgtagtcccagctactcaggaggctgaggcacgagaattacttggacctaggaggcagagactgcagtgagctgatatctcgccactgcactccagcttgggcaacagagcaaggctctatctcaaatttaaaaaataataatcatgataataataaaagaagcagatataggagaggtcttctgccctccctgtatttgcctaaaaaaccataaatttacaaagacaaaagttatcctacttccacctccctcctctgcctcccaccaccagggagaacaaaggttaaccactgaagataactttggactcttattggcctggaaatggtactgctttacaaattagcctttatctgccattcatttgccttcccccaagtagctacccattagagactcaaagtccttaaaggtcttttcctttgtcttacacttctttaaaaatttattgttctttgttgaagatgctatataagctggaattctaagccacctttttgagaactgctcattctctgggtgtctgtcatgtatatatgaaatgtacatgttaataaacttctgtttccttttttttcttgttaatctgccttttgtaacaggggtccagtccatctaagaacttattggggttattctacatgacaaagaactcatgagaataagtgtttcaagaaggggatgacaaatgctgctgagaggtttgataagatgaggactaaaatgtgaccattgattgtggaagtaatataatgaacttgacatgagttatgttagaaaattactgctcagggacaccaaattagaggagactgagaagtaataggaaattgaaatagcagttgtacccaaccctaaactgtaattgaacataaacagtttatttgatggagcttttcacgtgtcaaccaaaggagcagtgttagatacataaacattgctatgatgtcagagttccaatgtcatggccactgggatcactttgcccagacagaccattacccttcctctccagctctgacttctactcttctagaagtcactggtatactttatggtgtgtcttccaatcagactcttgggaatgtcttttattgaaaactcctgtggatgcataatcattttcccaagactcagggcagatttcacctcctctggaaccccattaactttctcaagtataattaacaatttcttcttctggagtcccacaatactttacatatactttagttattgcatgtattaagttggtttctagttgcttgagtgtatgtccaactagactgtgagcacactgagggaaggaatttggcttggaaagtaaaattggctcccagtgttttatctaaacaaataggctcaatttacaacaggattccatcctcttacgctgtgtattcccatctcttccatgctgcatcccaccacccttcaatgttattacaataaaattaagatcaaataatttattcagctaatttttcttgttttggacaaaatagacatcctaatacatttatagccaaagtttaatctagacactaaaaggagcatattttgcctttaggctctgtatttcccatcccgttcccagtcaagataatcacaactgtattctttaggaaattcttcacaaagaaccaaacatatgttactatgaaactagattcttggtatcctggtgaaaaaacctgccctcttgcttgtctgtaaatactggccttggctgggtgtggtagctcatgtctatgattccaacactttgggaggccaaggtgggaggatctcttgagcttcagtgtttgagaccagcctgggcaacatagtgagatcccatttctataaaattttttttaaaaagctagcctggcatgggagcttgtgcctgtagttccagctacttgggaggctaagatgggaggattgattgagcacaggaggtcgaggctgcagtgactgcatttcagcctgggtgacagagggaaatcctgtctcaaaaaaattaaacaaataaataaataagtaaacacttgccttgccctcagacttgaacaaacaactcgtgatttttctggggaggttcagcctgcctatgcagtactcctgtactctaccagcagtgtggcatcaagagcatgtgttgaccctgttaatgatttgtaatgttttgtctttcagaaccagaggcaggagaagtgtcccctccagtcggtgcgggtgtcaacagcaacagctggacctttaaatacggaccaggcaaccccaaacaatccggtcccggtgagttgcccgacaaattcattatcccaggatctcctgcaatcatctccatccggcaggagcctactaacagccaaattgacaaaagtgacttcataaccttcggcaaaaaggaggagaccaagaaaaagaagaaaaagaagaagggtaacaagacccaggagaaaaaagagaaagggaacagcacgactgacaacagtgaccagtgaggtcctcaaatggaaacaagccacttagccagtttttgtaataatggcaaatctctcccatgtagcaattccctgctcctttttcctatctacatgagccctcttagagacctcagaaatctgcagaaagttccctgtgtctgtctagaacgcatttaacaggttttgtcgtaaaagctttactaagtctggtgttaactctttctctccactctggcttgttttcagaacctaaaaagcagacccaagtttcctttctcctccgccgcaaaggagaggcttcccagccccgccagtgagaggttggactctctgccctgtgctccggggatcctgtcttgatgacacttgcagggcaggctgaaaagttttgagattgagcagcttgggagtttgtggccactgggtatgtgtggctaccgcgggtatgcgagtgccagatattggctgagacgagccagcttagactaattggtacaaggaaggcaagaaaacaaagacaaataaacagcggaagttatcagtatggaggggaagtgtaaacttaaagggaccagactttctaaatcttacaactcaagaggtggcagccaccctctaggagacaaaactacccccactgacaaggctttaggagaccctaaagtctgttggctgtgacgtcattatacctaaaatctgcatcatacctgcaagccaacagttcagtgttttaacagagaaccaccctgggaaacagaagcagatctgatgtgtttcctatacatgtcctgtgctcactttattaaaaattcttttgcacacaatgtttatgaaaaggccagatccttttccaatacttatgcaaaagcaaaagaaaaccccgacacctcacctttcgctgtttgttgtttcatagatttatttaaaaaaagagaaagtctatagctataaatctttaaagagaaatatgaatacaattcccctaaactctcctcaaaagagaattcagtctacagccatttaaatgatcattgctgctacagaagtgctttaagagaattgcctgaaacatctgtattatatcggccacctgccaatcacagctttactctttcaggtcactctggggctgcctcttgcatgtattactaaataaaatgatctctctttctctctctctctctcttttctaagaaacaattatgtgcactttgatacacaaccttctctaaccaactatatatcaagacccaaaaattgaagaaaaatattgttttctcatacagtgagcagatttttcaatctactaattctgtgacttgtcttggtgtgctagcctacaccttctctttggtttagttttccttttctataacactctgaattgctaatcttactaacacctatgatgttacctgaaatcaatctcccatatgtatgctgtatgctatgctaagactcctgaaatatacttactctgtgcttgtgtatgtgaatgttaatgcaactattacctagagtgaactttaagctttattgttgaatgtaattccattatatttccttttgtacacctgtgaaaaagtggagtagtgtttttttaaccattgttaatcagcttttgtgtatgaaagacacagtaaaatttctttcttaaatcaagatactggtgattcaaggaattttatttatggtccagccaagagccatctcgtgccaagacttctgctggcaagggaatggataaagctgttttgttctagtaacaattttggaatgaatactgacaatattccatgagggtgtgcaagcacaaattttaccaatctgacctctttgaagttgcagaatgctttgaaattctaatggtatctgaaatatcagctcatagaaagtaacaaaatttgctgtcaccttaaataagacattttaattttgttataatgtacaatttagaagtttgattaattatattatctatttaggcattaatataaaagaggtaggagtctgttatttaaaaaaagcattaaatttaaaaaaaaactgtcttgtctacttttagcttcattctcccatattttgaagggtgtgtaacttcagctctgcaggattgcatggggtaaaacttgttaccaacacatgtgaaccattgctacattgtaggttgtgatcattttgccccactgaagcccatgtatctgaccttacgtgccttttgaactaggagaatcgggctaatttattaatgatgataattataatgtatctgtacagcactttttacatttgcgaagtgctttccaatccatgttagttactagttattacagctgtaaggataaaacacgtcatgtggattcattttgaattggtgctattggtatttcctctgttattgctaataaatgaaaatggtggtatgaaagaaatggtggtcatttctaagaataggaggaaatagaacactgataagcaattaatactgaagaagattgctgcagtatgaaactcactgtaacactctcttatcacgttagcttttatgtccattactaaggcaaaagccccagtggaatcaagattcaaacttcatatcattagaatgggcagccaggaggttgctgcgtcactttgtagttacactatttcagttttctctaataagaattgcaacaaacccatttttatcacaagagcccttctaggcatctttttcattacttgtttagcccttgcacctctctacaattggaaagccaagtgacaccccaaagaaatgaacttttaggtcagggatagtggctcttgcctgtaatctcagaactttggaaggccaaggccagaggatggcttgaggccaggagttcaagatcagcctgggcagcatagcgagatcccatctgtacaaaaagaaataacttttattgagtacagggtgtatgccagccacactactgcataggttcagctgtgacaaatagattgttttgtccttttgtagttaaatttgtataaatataag

SEQ ID NO: 5 - DNA, 2157 bp, Homo sapiens
aagtttgaattatttaatttcacaagtcttactgttttaataaatacccaaaagtagacggagctggaaggaaatgtagtgtcaggggaccacctggaagccaggagacggtggcactgcggggtgtttggctggacactccccacaatgccctccagggggcgccaggagcctggataaagagacccgcaggagcaaaggtggtgactgtccctctccaccccaaggcaggcccaactagcatggtcccactcgggtcctctcctccaagcctgcaagtttctcctaagttagaagcatctgggcaggaaaaataatctggaaaaagctcaggtttagagccctttgttctgatccatgcggccaccaaatagctaggcaaccctgagagtctgcccctccggggcctataaaatggggttttaatcggcctcacagggcacatgtgtggatcaaacaaggcagagccttcctgagtgctttggaaactgaaacccaatacagacatgaggaggaaaacctgaatggagctctttcctggctggaaccatggaggtgtcctggaaaaacctgagcttttttccatattattttgcctgcctgagaaagaagtttgcccaaacgatacttcaaaaggcaaggagagccaagctcagtgactcacacctgtaatcccagcactttgggagggccgatcacctgaggtcaggagttcaagaccagcctagccaacatggagaaacctcatctctactaaaaatacaaaaattagccgggcgtggtagcaggcacctgtgatcccagctactcgggaggctgaggcatgagaattgcctgaactcaggaggcagaagttgcagtaagccaagagcacaccattcattgcactctagcctggaaaacaagagcaaaactctgtctcaaaaaaaaaaaagaaagaaagaaaggcgaggaggaagcttatctatggaaaagtgaagcactatcacaaggaatataggcagatagatagaactgagattcaactggctcagatggcaagcaaagctggcaacctctatgtacctgcagaacccaaccaagttggcggtcatcagaatcagaggtatcaatgtgtgagcccacaggaccaaaaggtattgcaactttttcacctttgtcaaatcttcaatggaagctttgtgaagctcaacaaggcttccactaacatgctgaggattgtagaaccatatattgcatgggggtacccaaatatgaagtcagtaaatgaactaatctgtaagtgtggttatgacaaaattaataagaagtgagctgccttgacagagaacactttgattgcttgacctcttggtaaatacagcatcatctgcatggaggttctgattcatgagatctatactgttggaaaactcttcaaaaaagcaaataacttcctgtggcccttcaaattatcctctccatgaggtggaatgaagaaaaagaccacccattttgtagaaaatgaatgttggcaacagggaagactacatcaataggcttattagaaggatgaactaagggtccaccataattttttttttttttttgagatagagtctcactctgctgcccaggctggagtgtagtggcatggtctcggctcactgcaacctctgcctcctgggttcaagcgattctcctgcctcagcctcctgagtagctgccactacacctgccactacacccaactaattttttgtatttttagtagagacgaggctggtctcaaactcctgaccttgtaatccgcccacctcggcctcccaaagtgctggaattacaggcatgagccactgtgcccggctaccttgattatttttctaatctggtcaattaataaacagttcctgctttcaaaatgaaaaaaagaaaaagaaaacctgaatagaggttatggaaagtgaatgtgctgccctggggtgggtgagggacacagaaggggtcagagagatagttcatctcgaaggggatcctaagggaaagagcatgcatctttatttatagtttgcaaaacatctttacgtgcatcaccttaataaacattactgcctttaatcctcatgaacacactgcaatctgattgtccccatttcactggcagcaaactgaagttca

SEQ ID NO: 6 - DNA, 1508 bp, Homo sapiens
cattacccaacttcaaattatactgtaaggctacagtaaccaaaatagtatggtactatacaagaacagacacatagaccaatggaacagaatagagagctcagaaataaagctgtacacctacagccatctgatatttaacaaaggtgacaaaaataagcaatgggaaagggactctctattcagtaaaggtgcaggatagctggctaaccacatacagaagaatgaaactagaccccctaccttttatcatatacaaaaattaattcaagatggatgaaagatttaaatgtaagacctcaaactataagaatcctagaagaggtgaaaagcgacggcgcagcacggtgcagcgcagctcctgctcgcctttcccctcgctgggcgagaggtgtctacggagcacccgctgccgccgccgctaccgctaccgccaccgccaccgccgccggctgctgtctctatggcgaggaggaggaggaggagcgcgagctcagcgacacaagtacataaataaaggataaaatattttatgaaacaaatcttcaatcaagtataacattttgatgcttggcatctagactcccttgtgccctcactatgccagcggcgactgtagatcatagccaaagaatttgtgaagtttgggcttgcaacttggatgaagagatgaagaaaattcgtcaggttatccgaaaatataattacgttgctatggacacgagtttccagctgtggttgcaaaacccattggagaattcaggagcaatgctgattatcaataccaactattgcggtgtaatgtagacttgttaaagataattcagctagggctgacatttatgaatgagcaaggagaataccctccaggaacttcaacttggcagtttaattttaaatttaatttgatgtaagtgggaaataactgtataacccagacttttttttttctttaatcttaggaattgattttcctcaagtatggtaacatgctaagtgaatttggtggttatcctagaaatatataaaacgtaacatttcaaaagcatggttttcttttttactatgggaccaaaaaaaatactttgatgttaaagatgttatatttaaaatatgactgcaactttttttgtatttggaaaactttgggtattgaaagtactttgatagaaaaaattatcttaccacattagttttactttcaaaaattttgtgtgcaatttgaaatatagccttttataatatttatccttattgtaaagatttttattgcagtcatattccagtttatgagtagattacatgtcaaatgcagtaagacattttctggaaccttgggtacgttttcctttcaagtcagtattacataatcattatgttgccacttcagcccacaaaagctctcttaatttacatataggagaactagtagtatcctttaacctggtgtttatcatatgtcagaatctgcattctaactcaagccctgggtctccacccagtttcct

SEQ ID NO: 7 - DNA, 2072 bp, Homo sapiens
atatgtattcactatttttcatctctctagacttttgcccactaatgattgaggtctagtaacatattgcaagtagtataacaatacatactatattattggaacaattgtagactaggtaaaaatatcttttaactgcttcaagactgtttactagatgagatgattaaaagcatagactccctctgaagaaaggatatttttcacttaagtgtcttctaatcaacagccagtgctaagtggctcctctttaaataacagaaggcaacgtcttagaagctttatcatggactcttctcagtgacaaatggtttttaagggtgctttgtgaaaataaccagtcatagtgagagtaacagataagagcttaaaccttagatgtcaacacagcccaatctgcctgttttgttagaaatacatctgttagcaaccagcaatcctttattagctccagcctctgtatcagtcaaatggattcctggtatttaaagctgtagatgtcttcttaggttaattcaaattcctgatgggtatctctattgtttttatgaacctacttgtataaataggccgggaagttctactccgagaaaacaccaaatggcggatgacgccggtgcaggggcggggtccgggattccggaggccctgggatggggaacagcggtgacttccggggaggtttcgtcagtagcatccggggcccagggtcgcggccgtggacccggccgaggccgcggagctagcggaggcaaggccgaagataaggagtggatgcccgtcaccaagatgggccgcctggtcaaggacatgaagatcaaatccctgaaggagatctatctcttctccctgcccatcaaggaatctgagatcattgactttttcctggggcctctctcaagcacgaggttttgaagattatgccggtgcagaagctgacccgcgccggccagcgcaccaggttcaaggcgtttgttgccatcggggactacagtagccacgtcgatctgggtgttaagtgctccaaggaggtggtcactgccattctcggggccatcattctggccaaactctccattgtccccgtgcgcagaggctactgggggaacaagatcggcaagccccacagtgtcccttgcaaggtgacagacggctccgtgctagtgcgcctcatccccgtgtccaggggcactggcatcgtctctgcgcctgtgctcaagaagctggtcatgatggctggtatcgatgactgctacacctcagccaggggctgcactgccaccctgggcaaccttgccaaagccaccacctttgatgccatctctaagacctacagctacctgacgcccgacctctggaaggagactgtattcaccaagtctccctatcaggaattcactgaccacctcgtcaagacccacaccagagtctacgtgcagaggacccaggctccagctgtggctacaacatgggggttttatacaagaaaagtaaagtgaattaggcctgaaaataaataaataaataggtcaggaaaatgaataaaggggaaaacaaccaaccaaccttttagttacagcttgattcttatttcccaaactatcatagccttagttttacaaaagagaggctgaccttgattgtgcctcacttaggaaaatgactaccttatgctagttagagaagtgataagtctccaaggttttataaataacaaaagcagattaaaaaaaaaataataaaagcctgtattttactcctaatggaagcacattgaaaaacagtgccatggtgtgcaaggttattaaacaagtacatctaactgctggaaagttgaaatctcacctcactgtttgcagccagcaggctttctcctggcaatccctgactgttttaagtgaagacaggagaggagttgcacagccagctttctccatatggggtaaggaaaagactgtgcagaggtaaagtgcagaatgcaagtgcttcaggaaatgagctccagctctagctcttcttcattgcatcaacatcaaatttacttgtaaaatcaagcagatactaataaagta

SEQ ID NO: 8 - DNA, 8140 bp, Homo sapiens
ctccacggaaatacaccccagaatcccaacagccgcatactctcccggccccagagagccttaagaatacaatattactctggcagcaacacccctgtagttgtaaagtgctgtgcgaggggaaggcataagcgccaccatatacctgctcgtgttacaggctctggaatcaaagtattctcacatgacacattactaccaataacagattccggctccgtttaaaaaaaaaaaaaaaagttggggggtggctacatatttgtcctgcttttgtctaaaaaccagaacccaagtactaactacttttcattcttttcaacctttcatgaaagcaattcaaccaactgcggctccacccaaagagcttctatacttacttttcttacagtttttgagtgacgcactacaaaacgatgaaaaaaaaaagaagaagaagaaaaggaggaggcagccctctcctacagggcgtcttccgccctgtaaacttggcaaaaggcaaactggcctgaaatacagcactctccatataaggcagcccagctaaacatgtcatgcgtaatttatgggtagcaagcagagaattaacctttgcgtgcacatatttggcccagatgaaaaccgggcgggatggcagccccggggccagggatgcgggagccgccgggaagacccgcgcgccgctcgactcagagggactcacaccttcccccgacaaaggtcattaagttgtgagtacacttgcacgcacctgtttctcttctcgcccccctgtttctccctgggtcccgctgggctgccaagccgtgcgcgggctgtgccgtgacagcgtccgcagagcccgcggcagggaagggcgcaggagcggctgcggctcaccctcccgccttcccccgggcaggaggtgctgagggacgcgaaaccaactaccgcgagcggcccgcccctgcccgggagaaccgcggccggcgagcacctcctcgcacttcctccttcagccacgggcagacccgccggagtccgaacaatgaagcggcgcggggaaactgtgaaaatggaaacttacctctcacatttttttttcagaggcggccccactgtcgaccaagtgcccaaggcattgtgggagtcatgattccaagatgcccgcgacggaaaatggaacttgtcagctccttgtcatgggagcattgtgggcgccacaactcattcagctgcagtgaaaagactgttgcatgtcgctgtgcagcctcttatcgccgaggtctggcttccgctgctgctgcgcggcccctcccccgcccgcccagccccaccaggaagcccagggcggactcgtcgagctcctaatgcacgcggcggcgagaaaaacgctcttcaactttccgccggcgccctcccgcgcttccccgggccacagggtcgcctgtcaaccggacagagcccgcaagagcgggtcatgggcggtcgcccagcggcgccgagagcaggaggaagccggagcccgcgcgggcgccgtggatcccctcggcctcccgttggtatcttccatctcatgcgttcagcattgtaacctcgcggcgggcgtgcagaccggacgccctcccgcttcttctaccgactgctaggcacaccagtgggttcattttgaaagaggcccttgcaccgggctttgcaaggaagccggcaaggttagattgaaggttagaagccaattagactagaatcctgcgatctggtgagactgccgccttaaaatgcaccaaacagtttttgaacctggagggctaacaggcgggaaaaacatctgcaagactgccaccgtgtatttttctcaagtaacaggctatccacagttttggaattccttagtgaaactgtcacacaggcacaaacacatgtcagctttccttctagtttgtaaataatatttgtaatttacaggccactgtattcccaactttgcaccatgtgatttagagaaagcaaagctccctctttaaaaataatatgttacttctgaaataccgggatattccacggcaagtaagccatattgtcgccagagcaaataaaccgcagccccatatcataattcactgggtgctataagatgtaacttggctttgctttgaatggaaagaatcctgaacgtctgtgatgtgatgaagttttggagactgggggcaggatttcctttgaatgtaaggaattcggataacttgttcaaggatgattctagtgaaaaacgtttgtcccatgtttgttgggacaaaaatgctggatatggtacaacattcttcctgcaggttcggttttgttgaagagagtgaggccagctcgaggtgaaggaaaaacatcagaaaggtgctaaagtgcagaaatatcttccagaggcactaatagccgactttagttcttgacctttagctagatccacaaagcactgagttaaaattgtacactgatcccttccagaacaaattaattaattaaatggtgcctcttcccagcgttaatcgtttaaaaggactcaagtacccacacagtttaagcaaactaaaagaacactgacactttctcagagaacagggatgggaactttctatctgcccattagtatctaccccaagctacgaagacttccattcctcttattaagcattcagcaactacatttagtgcctactatgccagtgatgcaagaatggataagacagtccctacactcaaggataacgcctctagtaggtgagagacaaaccgattaattctgcataagggataagtgctgtatgtgggaagcaatccaatgagggctctgaggatggcaaaggaagggttcctggaggatttacatttaactggtgccttgaaaggtgtgtagaagttggcaagatcaaaagggagtagagtccaggtggagaagagaaaagagcagggcaggctggatggcatggctcacacctgtaatcccagcactttgggaggccatggagggaggattgaggccaggagtttgagaccagcctgggtgacattaaaagaccctgtctcaaagaaaacgaaaggagcagggtatatacaaggggtctgccagccttctcagcctttctgtgagaagcgagggtagggtagtacaggagagtggcaggagatgacactaaaagtaggtctgtgttgatctaacgagtctcaactttactgccaaaactaatgaactaggaaagtttaggcagcaagggccagagatggagtctggacttgtattgcagaaagttcctgtgacggcagcttggagggtgaatgagagtgtgggatggaggggtgaatgggtgtggacagactggaaaaatgactcatgcagggaatgaggaagggaggagccttgggagactctcaaatccctggcttagcctactgaattgcttgctacttgcctttttatgtcttcattttgcctcccattgtctgtgatattaaaggcctaacttcttagtagagcaaactttgcatctgctagcaggttggtgccctagctagcttccatgcccctctgcttagaatgcctgcgaaccactaaggactaatcctagtggtagaaatttattttcaattgttctcaaacccttgtagaattccaagttagaactgtagtgttcttttttcatgtgggttagaaaatttgctgtttggagcaacatggtgaaacacaggacttttgaacctgcttatggtgcaaaaggggaaattatatttctacttcaacactggaggaggggggacttctgggagcaaaagagaaatggaaactgagatgagacatgttttttactccatgacagaatacaaagaaatacaaggatgatcctttaatgttagaaacagtagaataaccatcctggtaaataaaaaaggagaaaaaatgttattttacattagatacagaaaaacagaatggctaagaaaactcacaaagcaatggtcaatctataactcgagtccaaataaattgtgatataacactaaattaccactgatttggcctaattgactatcactggataacattataacatgaatgataatatttaaaattttaaagcactgtaacaaacaccagatcatgttaaaactattcaatcatgttgtcagctttcaactgccagtagcatcctaaccacatttcaaactatggaaattactaaaaaatcattattgtaataaaaagttaatagttcctcatttagaataccattgatattccctcagtgccaggagaacattatggtttctcctatttctgtgaagtgtatagtctacaggttcataagtgagtatatccatgagtataaaaagaaggtcatttatgggtggagagggaaattatagaaaacaatttcagatgaaataaactacattttcagataaaggaaagagtgttcactgcaggttcctgaaatatttcagtccattcaagttttaattataccaatgaatctcaataaaaatacagttaaggaatatggtttttatagataatgtcagctccttgtttaccaataataaagataaagataatggcagcatttatctttttcagtccaatggggatatttaaggtacctatgtaagtgtgtgagtgcctgtgtgaattgtgacttacttcttctgcataccacattcatagctcaataagctctcactgcctctgcaatataacttgtctttcctgacacacacacacacacacacacacacacacacacactctcacacaaacaaatcacctaaataaaaatatctcaaggaggtatactcttttaaaatgctatttttattataccaggataaaaataattgattgaaagatggtgtcaaaaccagaacctagtctcatgtcctgtgcttcctaatcaatatttaaatatagatggtcaagagaagatgactctaaaaggcaatcaaaagttgcaaacattcttgtatggagaatcaagtttaagtagatgcattaaatttatcacattaaacttcacaacagggttgaggagagaggtgagaccttcttttgtagaattcaaacttgttcagatatttgaatacatatacttgagagaaagaattacatgaatttagtttatcttcaaggacctttatatatttcatacacaacacaatttctttgtgctcattatttaaaaataaaaatatgtattctaatagatactatgtatatatttgatatataatacaatatattgtatgtataacacgtatattgcacatgaatgtgaaaatatataaaatcaatatatttgctactaaatgtttatgaaatttaaagcagttaaatattatgcatttctcaattaagttattttacctaaaagttgaatctgtatcttcaatatcattattttaggatctggcaatagagagacagtaagcaaatacattttgaaattaaaagttcaaaatcatagaattttagcattgaatggaatgttagagagcatctggccttgttcccttgttaaaccagaggagtgcattatttaaggaacttggcaccatggcagagcagaactgacatcagtgtcttctgactctctcaggccattcattttcattgtctttttttttttcttaaagacaataaggacaagaagaagctctaaaataggcctaacagtttccccagtttaatgtaaggaggtgctacatgagatttccaagagtatagttcttccttcctctgtttcttccttctttcattttttccttcttttattctttctattttttcatcctttctttcttctttccatacagaaaacacttttcacacaatgactctattcatttcacaaacatttattgagcatcagccatggctaactcctattctaggtactgtggttacagaaatgaacagcacagataaatcacttccctcaaaggggttgcattctactagggggagacaagcaacaaaaaataagtcaaaaataaaaaataaaagataaacatatgaggtaatttcagatggagataagcgctatgaaataaagcaggttggggggatttgggagagaaggttgtgtgaaacaggatggaggactgagctggtcatatgcaggcaaggttctcggtgaagtgagaaataactggggaaagagcattcaaagcagtggggactgcatggcaagagccctaaggccagggttcatggtagggctagagagccaatggtgaacaaaaactacctaacctcaaggagcttacagtcaaggaagagggaaaaaatgaatctccatcaaattaatcacactcaaaatgcaaagctacaaccatgatacttttcctcactgggaaccattgaagtgtttgattatgttagaggcaggggtggggtggggtgatggaacattatctaaattttgttttcacaaagataactagataactcttgactgctgtgtaaaggctgatagtctaatctcagaagagactgcatgaagtccaccactgctgagaatgacagcaaaccaaaagtgggctctgtctaggaggcaacagacagcaaatggctggggacccagcagcggaatgtgatttggttgaagaccctcggcaatggggtacaacaaaccttagaaccttacatctcagagttgaagagaagccataagactcatgatcctcgagataacataacttgagggaagggagatgtggtatgcctgtttgtgtgtgacttatttattatttggagtcaacacaatgtagaaaattcgaaattagtgaaggtagaatattttgatatcagcagtgtttccagttcccagagatagggaactgtttgtattacagtttatttccttctaggcttttccaatgcatttttaaaagcatagttaatattgtactatatatgcaatttcttttccaaatttaatcttttaagacaatcttataaaacaaaggccacctcccccatgtcatttatatataatcttcatttttcatgaggtaatggaagctggagagttggcccttgaccaaagccttgcagctaacaagaggacaagcctcctgccccacagtgtttcacagccagtaccccaagctcctgaattcatctgtctaatgtgtaatatatttataaacactctacctgggatgtatgcgtaccttctactatggactgttgttaaagacaagtaaatatgcaatcgtggtctttcaataaactaaacggatataaaaataaatatagaatacagccagaagatcaaaattgacatattatctatttatgcttataatatgtaattacatgtaatattgtaaaacactttctaccatttcataaaattctgtgttgttatttagcccagaattcccttgcaatcttttaaaaatagtatctaatagggcttttaatataaatgtcgtagtgaaactgttttatgtactgtaacccaaacatttctacgtagtaacactgttccatatagaaaacaaatatgaaaaaatatggccattgtcttatttatttctaaaggtaaaccaatctttgacaatgccaatagcagtgtcaatgttcctaaatgttggctgtatctatctacttactcattgtattcttgaggttcctttcctttggtttctatgatattccacatccctctcttttcattccattgtgtgagttctctctgtggatcttttgttagctcctcttattccttcttgcctatctgagtttcctgaaattaccttcaaatcatgtctcgaaagatgttctaaagagacctttgaataagaacaacatttgtcccattaataaatggtgggagtttcatatatctgtttctttttctcttctttcctctttgccttgtccaaaagagtgggaactgagcagtacagtcataaattaattttaatatattaacttaggcatcagtacactggctattgttccttaatacatttaacacatagtcattgactgctgattatgtgccaagggctgtgcttggcactggggataaagaagttattaagtcttttgcaaggtgttcatagtctagcggttggggacagacgtgagggaaaaatcacagttggaaaa

SEQ ID NO: 9 - DNA, 126841 bp, Homo sapiens
acaacagacggtagcaccagtacttggagacagtgaaggtggtgtagctcaccttccacacgccgtcaaagctgtaggtgcccacaggctctgcgatcacgtcttcaaaatccacctgcaggggtggcaaggggaagcctcaactcacagaagccacccgcttctcaagcttttgggtgtgtgcgtgcatgtgtcagaatcccctagaggtcaggttaaccttggtggctggaccctacctgtattaggctattcttgcattgctttaaagacatacctgaggctgggtaattgataaagaaaggaggtttaattggcccatgggtctgtgatctgtgcaggaatcatggtgctggcatctgcttggcttcaggtgaggccgcagggagctttcaaccatggctagagaagggagagcaggcgtctcccctggtgagagtgggagcaagagagagagctgggcagggggtggagtgccacactttacaacaaccagatcttatgagaactctcccactattgtgaggacagcactaagccacgagggatctgcctctgtgatccgatcacctcccacccggccccacctccaatattggagattatgtttcaccatgaggtttagaggggacacagatccagaccatatcatcgccccagggattccgactccccaagtctggagtggggcctaaggctctgtatttctaacaagctccctgttgagcccaagctgctgctgttcctaggcaccgctgaccaacacaacacgctcgttcaaccccctcaaggtgagcgacttgcttaaagccaacagtgacttagtggcagtgctatagtcgcagctctcaaattctattgttttatgatctgaagggtgttggacggtcgtatgcatcctacagcaatttactgagcacctgtggattggatggtgaacaggcagaggttcctcacatcgcttacctaagctctctcgagccctgctatgcatgaagcaccttcctagctgcctacacatgggtgatgtcacttagcatcactaagcctcagctgtcttgtctgtaagatggagtcaatgaacgtcttccagtggtatcatgaggatgaaaggatgggaggctgtaaaatccactggtccacagtgaaaccctgtctctactaaaaatacaaaaaaaaaaaaaaaaaaaaaaaattagccgggtatggcagcgggtgtctgtagtcccagctacttgggaggctgaggaaggagaacggcataaacccgggaggcggggcttgcagtgagccgagattgtgccactgcactccagcctgggtgacagagcgagactccatctcaaaaaaaaaaaaaaaaaaaaattccactggtcaattaaacagcagtgaaccaaattagctgcttcatgactggtctccccatggttgttaccagtacagcccgccaagtgggaggttgcagagctgtttgctaatgcctgaaactgttctgagatgttttctttctagcagtgctcctgggccattcaaattaaaagggggtggatgcaggtacagactaatcagatcaacaggaggggcctgtgtggtggcctgcagggctgaggctccaacttcaatcttcctggttagttagtccctttcccgccttggttatggggaggggatcctctcctctattgcatcaccaatattaaaattactttcattataaaaaaaatggccatatcacagagaattaacagaatagaaaaaagaaaagagtcttgggtttgtacttctctattactaaagatatgattgttttggtgcatttctttccagtacaatattttctggggaaagaagtgactagaaccatgttgctcagacagtgttgggccctcttttctcatgtgactttagcttctgagctcctgcaccccacctcaggtccctgatccccctgtgctctgaggctggggatccctgaggatgaggcctcactcggggtggtgtgtcagcaggcagcacagtttacagggtgagactctgggctgcaggagaaatggaaaagctgacctcccaggaccttccttgtataatcttggcccccagctttctctgctgcaggtttcatcagagatgacttaatctcttatgcaaccctgtggatgggaggagaggaagaaaatgggcctcatcttctcaggaaggatgttacttcttcttggagggcttccaggaggtggtggctggctgggaatttaggggacttcgggattggaacagggatggaaaagtcatattcactccccatgtttatggaggttctagtcaaacccccagggcctggatcctgctgactgagatcatttttctttcatgtattcatccatacatccacaacccactgagatggttaggatgtttgtcccgtccaaatctcatgttgaaatgtgatccccagtgttgaagatggggcctggtgggaggtgtttgggtcatgggggcggacccttcaccatggcttggtgccctccctgtggtcatgagtgagttcttgctcgttagttcacatgagacctggttgtttaaaagaacccggcagctctcttgctccctctctcgccatgtgatatgccagctccccctttgccttctgctatgattggaagcttccttaggcctcaccagctgcagatgcctgcaccatgcttcttatacagcctgtagaaccatgaaccaaaataaatctcttttctttataaattacccagtctcaggtattcctttatagcaatgaaaaacagactgacactcaccatctatccactcattcatctatccatctatccacctatctgcctgctcatctatcatccatctatccatccatcctttcatccatccatccatccacccacccacacatccaaataaatactgattgattacccactttgcccaggcacactacctcttgagcagtgcttagcacaatgcctggctattgtgatggtaatattgctcagtgatggtaattattccttcaggtgctctgaagattcctcgaaaatacatctgagaaattcttttgacatcccggattattctccagcctacttagttataaatgagtctgcgtgtgtctcagtctgtgctgataagacggatggagtcctcctttccttacagtagtaagtacagtacttacagtaataatcctaccgccaatggcttctgtatgtgtcttttaattatctttcttcttcttcttcttcttttttttttttttggtgtttgcagaagccattggtgctaacatttgaattatttccagggattgcctttgggtgctgtgtgtggggcaagtgctctattttctgtgaatctcagaaaacatgctctcagagggctgggctgggcttggaggaggcagctgttcccctagctcagatttgagcattgagagagctttggccacagcatgctagtttggggagatatttataaggcccggctcaggcagctctaggcagctgtaccatgcagcacaagcatacggtgacttcatttcttaattcctttccagaagagaggagatggctttttcttggagggtggtgggctgaaagcctgcatctgcgtgctgaggctcaggacactgtgtgcagttggagagaggggctggagggtgaggaagggggaacgatggtgcacattctgtcggtgtccccttctgtggcatatttatttttggaacagcaagagacccagttgattaattgaaaccagccagcgcagtccccgcagtctctgagagggcggggaaggtgtaggatagcagggcgggggattgcttgaggatgcgggggaggacaacagtcacccggggtcgaaaatacctcccccagagtcctgcatgactcagtccgtaggcatccaggaccttggacaattcaaataggatatctgtgggtggggaaatagctcttagcagggtggggaggtatatggtcccagtatccactggccattgagttactgtatgatttggggcatggtactttccctctctgagatcctaggttttttgtttgtttgttttcttttttcaactctacacagagacgattgggccaagatctgtaatgacacggagttagcttcagagtcagaaaacccaagtgagaggcttagcttttgccagatcccagcttcctcccctattaccttgctacttaaaaggcagttcacaatcagtgtgtcctgtctcccaacaaggtaattatagaagttgagagtgcttagaaatattcatagaaatttgatgcagtaattttatgtttattgaatctaacaataaacattggtgcttgtaactgtacggctgttttcatttcatttttccagtgattaatttttgttgcgttttgcaaaagtatagctgtgcagtggattagaataataatattaaaactggtccttcactcagttttagaggcactggcctacaaagtaggaagtaaaatgaggtgatagctgcaaaaactgtaaaaatgacaaagctctgcatcttttgttataaaaggtagcaacaaaagaatacaactgtgtacaatctgggataaccatggtaacacccacgatgtatatggccctttatgcatgtcagtttggggccatgtatcttacatgtgttatttcacatggcacgtaagggactggcagagtgacgctcaggtcagcctgacagcagggtgattgaaggggccagataccccagcagggcctgaggccagaacacagcataggctggctctgatgggtggaggaggtggccaggcatcatctggagcttggagttgagaacatctgtgactcctccttcaggagggtgctctaggagttgagagcatcctaggtaggaccatatatctacccccatcctagttccctccagcctctcttttcagctccaggtctaccttaagggacctaggacacctgggctggggcataacaggacttggttttatgtaaaggagctgggaagagactgagataacagagggctgcaaggagagagacagagagagaagaacctgccagaagaagctcctcagcaatccactaagccctgatctttgcctcactgcctgtcccttcccatccgctcttctgctctctcaatctctgccttcaagaaatttggtgcatattggaatagggaggaatagaagtaccctgggtggagctctgggcttggctgtgcacgagctttcagtgggtggtttgctggtctccaaagatgaccctccattagtcatgcttctcggtgtttgtcctcaggtagtctcatcccatcttgagtctgggcttgccctgtgactcactttaaccacaagaatgtggcagaaaggatgttgtgccagttctagaactaagccttcagaaagcctagcaccttctgcttttaggagcactgagcccccatgttagaagtccacttttatactctgctctggagactagcagaattagaaatgcactgctgaatgctgctcgagagactaatggagaggccatgtgaataaggaggcctgaaactacatggagatagagggccagccaccccagcaccacagctcagctgtgcctcccagccatctctgccagtcctccagggctatgagtgaaccatcttggatgttctagctcggtggagcccccaggtgattgcagcctcagccaccatctgactgtagctgcatgagaggcccccagtgggaccagcaggactgccaagctgagccctgcccacccacagaactgtgagaaataaaaaaatggttgtttccttaagccattaagttttggaatgatttgttactcacaattgataactgatacagtctgtctttagggaaaacaagggataactctgggctccaggtgtcttctataggatgaatgggacttggttgctgacaagctgacaagtttgagcgtgaaactctttttttttttttttggagaaggaattttgctcttgttatccaggctggaatacagtggtgcgatctcggctcatggcaacctctgcctcctgggttcaagcaattctcctgcctcagcctcctgagtagctgggattacaggcacccaccactacacctggctcttttttttttttgtatttttagtagagacaggttttcatcatgttggcctggtcaggttttgaactcctgacctcaggtgatccacctgccttggcctcctaaaatgctgggattacaggtgtgagccaccgtgcctggcctgagcatgaaacttttatgctcaaacattaaagtgtaaacattcaccagctcagctgaataagaacttctgggggcaaggccaaggaatctgcagtttagtaagtgcccccaccactggaccctgggaaagtggactgcattttgaaaaactctagatcagttgatacccaggagtcctcataacactaagttgtaatacctcagtgtgaattagtctgatgcagctcttcttagaggtcattgacagagggcaagacatttccaaaaggaaggaattgccaatatggaatgacaggtggattggatgaccctctattatttagtttcaacctgcccttcctgccttctctcccacaaattccctttcagatcctctgtcctaatcctcttcgatagttcattattcttctgcagacagagcagcgaagtgttatctgttgtacccactatgactagctgatggtgcatggcttccatggagcagtgctgtgatccattagtcatggagcagtgctgtgatccattgtcatgtctgccatgaacactggaaggggcagtggtaatgacagcctcttacgtttgccaactctgcccaacattcttcccagtgttgggaaagcctttgcttattccatttcttcttggaaagctttgttcctccatttcacatttttaatttttctcatttttatgatgcaccatggataccacctgtccatatagctggcttctgatttttccagatgaaagtaattcttcctctcctaacctcccatgacacctaacctggcactcatttacggtgttcagctccttctcctgtatgttctcattgttctcctctcatcttctccccaggaatggattccccgccaagggaggtaccaggtcagtttcttctttgtgcaacagggtgtccctgatgagcacaaacctggaacaagtgtttgtagggctggtgggcatctggttcctctgggtgttgtgtagcctgagccggggggcaaatgggtgtttgtttttctgaagaaggcaggcgttctgtggcagatgtgggtggagggggttggggagtagtatcatggagaggctgggatcctatctatctccttcccctgcttgaagggcaacttgggagaagctcaagagggaggagttgactgcagaagctgggatacctgcataactctcaggttcaagcatcactgctttagggccctgggggcctatgtgtgagtcaagaaagggagatagagagagaagagagagagaggagagagagagagagagaagacagaggagagagagagagagaagaaagaggagagagagagaagagagagcagagagagagagcatgctgtcagtgaggtggccctaagccctcttggaaataacttggaggcactgtggggtggctctgaggtgctgaggtatacctgtagtggggctaggacctttccaacctgggtctgaaggttgaggcaaccttgggtgtacctgctggtgagctgagagccctggggacctttggcagacattcccacccctgcagcctggagggtttgcatgcagtgaggctgtcctgctcatcactacgtcctctgggacagcacattgcctgtgctgaacaggcattcagttgcgatttgtggaatcagtgttggtgaggagggcaagtggcaacagaaatgggggtgtgctccccccagttcctcagctacaatctccatgaccttctacactgccctgggcccagtcccgagccttggagaccacagctgaagtctgttggagtatacagggctcttcctctgttcttggctgcctgggtttaaaggcagggccaaaaaggggtgcctcccctctactgggggtcaaatccatggatgtagtatgcctatctcctactcttcatccttggcttttttaaatgtgaaacggccgtgactggtggcaccagggacttgggaccagagagggcaaaggatttcctcagagtcacacagcaagttactgtcaggtcttggaccagaacttgagtctgtagccaggtcctattccagcattctttccgtgtcactcatcctagcccatgagaaacctgctaccacctgtgaggccaccctgccacctgccacctggggcactgccagggcctcctgcaccttcctctcagtctctgtccagtttctccatctctctctgtctccctcattcccttttccttcccatctctcttttcctccatcgatggcaaaacccgggcagttgagaggctgaacagtctggcttcatccctcctagccacagtcccctctctccttctttcttttctttattctttaacagactgtaacagagacctgaaatctacctaaacctgtttgtgatctatatctgagtctgctttatgatccttgttctgcattaacttttttcatttctcactcactaaaaataaaagaaagaaaaagtcaaacaaatccctaaagcagagaatgtccaaaacataccaaataaccacctcctctggacaaaattatttgcggcatcctttcttagcctttgctatttttgctagggctcagggcctccaggagaggacagctctcagccccaggagggctgcgtaaagccgctgcacctgtgccgccgcccccgccgctccctctgcgtcataatccaggcctgcggcttggagctggctccctcctggctcagagggatccaagggctccctctgtacttaccagccattgtgggtgccctttagaaaccatgttctcccgtgggatcctctttcccatctccctgcagcccacctgggtgtaccagatggctacctgggcatgacgcaggctcctggcttagctctcttgccctctagactgcaagctctttgagacccttctttgactcacactgtctcatccttgctgggtgccagggactgtgatagacactttcaaacccttcatctcattcaatcctcatgctatatttctaacgcacagtgctgctttgagattcgtttacctggtggaggtaaattgggaaatgatattattcccactttacaggggaaactgagtctcagaaaacctagttggtttgtccagtgttatcatttttaggtaaaatggactggatttgaaatcaagtctattaaagtcaagtccaggactattcctgctagatgacactgatggaaaccataactaataatattttacaggtacaattttatttacatgtatatagtgctttacagtttgtgaaatttgtttcctaattttcctcatttcagctttcacactgtgctatactgtatactctatctccatcactaacgatgtatagaaatataatatccagtataagaagagctgtggtggaggaatgccctgagtgaagcagggggacagaagtgggagcaactaattgcctggaggagtcagggaaggctttctggaggaggttgcatttgagttgggccttgaaggctgagtgaggcattcaccacctggagaagagaggacaggcacttctggcaatggcacaggaatgtactctggtgggtgggctggcaggtgggagccaaccaggcagaagaagcaggttggggccagattgtgttgggtttggacagccacgtggagaggctaggcttctccagcatgggaggtgccccactgaaagaccgcaatacaggcctgtctgatccagtggccaggagctttgagcgcttgaaatgtggctagtgaaactgaagaattctagattttgtttaactttaattaaaatgtaaaccccgatttcattattgaaaaatttttgcagaatgtttgaaacagtacaggcatgcgaatcgattttcacatgtacattttatgaaatctaaatgcagaacaagcatttcggatgaaaatgtggggtctgaactgaaatatactgtgggtataggaagcacactggatttcaaacttgaagactgtacaatagctcattgataattgttttatattgcttacatgttgaaataatactattttagatatatagggttaagtaagaaatatcaggaacattaatttcacctgtttgctttcgcattttaaaatgtggctgctagaaaattttaaattccttgtggtaacagtatccctattggacagcactggcctgagattccaatgctttcagtaggatctgagaggcctcagacactggcctcttaacagcccctccagtgactcagatgctggtggctggggacccttcttggaggaattctgctttagaaaggtacctctgagccagttgtggagtcttgcacctgtaatcccagcactttgggaggcaggaggatcacttgagcccaagagtttgataccagcttggtcaacataatgaaacccagtctctactaaaaatacaaaaattagctgggcatggtggcactcgcctgtggtcccagctaatcaggaggtggaggagggagaatcacttgagcctgggaggttgaggctgcagtgaggcgtgagtgtgcgactgcactccagccttggggacagagagagactgtctcaaaaagaaaaaagaaagatccctctgggtactggctggaagttggattgaaggtgtgggcctggaggcagcagggccgctagtgtcaccaggaggcgagggaagaggcccaacttcagacgctgagagactccctgagggctagacaaccccgagctttctcttcgagggtcccgggtgccgtctgccctgtcctggccactagacctggggtgagggggtagctaggggagggctgggcatggccctcggccttggggacagatattgggcagtgctctgggggagtgagtgtacctcgaggggctgccggccctgctggaagctgccctctggggattaaccctgcacccactggagagaccgcagaaatgccccttggcacagaaaggagcccaacttggccgcccgttcctgttcctcccagggtgagagccaggagtgagtggcaggagcgtcacagtagtaaggagggattttctttgtgactcgctcctcctgccctgattagcacttaggtcatggagatgaggctaattttttgctcttgattttgctaaagatccttcggtgatttagaagcctttttttgggggtggggtggggttgggggggtgatacagagacaacagagcaacaagtctcttttcagggaaactgtgtctgcagcagataccctcccctgccaagcgcccacgtctcgcaaacctgacactctccgcccgccgaggcaggcctgcagagcctaccttgactatgtcctcgttaatgttcttggggtctcggttcaccaggtcaatctccttgcagtggatatccttgacgatctgggcctcgagatctgtgtgctcttctgccatcatcgcagagctggggggatccacaggaggagatccgagctgtgtggccggctggggctgaaaatacttggggcagagagaccaattcagtgtccccagacttatgtccctgccagctaaataggccccacccagcatgccggctgacagctgtcccacataacttcagcctgcctctctctaaagcctcctgtggcaggcctccaagctaaaattaagactggagctcttctggaaggccgatcgctccttaaagggggctgcctcagggcactgggcctcaggagagggtgcagagggcctagcgtttcctatgcatcgtgtggctgtggccaactcggcggtcgctccggggcccctggaatttgccccactgctgtcagcattttggctcctttggggtgcactgcccgtggagggaagtggggttagtccctcctctgcctctggctggctgtgtgacctttggcacacttcacctctctaggccactctgtccccatctgtaaaatggagagatgataataacaatcagggctctcctacccagggaatggcttcaggagctggaatgcgatgtagtggggcttctcgttggattgccagtgcctggccctgctgcttggtgacctggagcaggtccgagctttgtgggtttctgaggtttccacctggagcaggagttgatggactgtggtgtggggccaggctggggatgaaacagggagaggaagctgctgtggggctgcccctcgtctgccgtctggagcctgcactgggatatgcccggtggggggaacatgaagtccatgttcgtgctacccttcaccctgccctagtgacagcttccaggattttcttgggtcccagacactccacatgcatcagtggggtgcacctctcttagatacctgctcggtttttctgtgccctcttctaactcagccttcccctgggctccagcagcatgaaggatggcaactctgaatcctcaggggtcagggtctgtgcttccatttacctgtctattcactccttcattcaggatttgctaatagctggggataaacagaccaacaaggctctgtccgccttgaagtgctcccagtcaaggtggggagactaattaaaacaataagtgattataatactgtgcggtaagtgccacagatcagagatattttacaaagagctggtcttagaagtccataggagtcagtaacttactctgaggacaccggggaagacttcctgtgggaggtggctttgcagataggtatcgaatgacaagcaggagctcagcacctagaacacttcaagttacaggattgtggatattgaggagtggtatagacaggaatgttgaaaagtgtggagtggctggagcacagggtgtctggggttgaggcaggagatacagctcagctcaggcctgggtgtgcagcatcccaaatgtcatactaaagaatgtggattttgtctaggggtgctggaaagccattgaaggcttcaaagcaggacagggtcggtatcagatttgtgtgtgaggaagctccctggtggccaggtggagggtggattggagctgggtgaagtttgaggtaggagggggaaaaccagaggtgatttaggctttatcaataattacacctggctagtaacacaaaggatgcaaaagtaatagtgacttgaataaggtaggaactttttttctcacttaacacaagtagttcagaaatattatagtggctccatgatgtcttcagacatctggactcccatccttctgttctgctagcccgaaagccacctcataggcacaagatgtctactgctcctccaatcatcatctctgagtctggataagaagaaagaggaaggggcagggacaagaaacgacatctgcgaactgagtcggctctgttataaagctttgttagaagtccaacccaactacttctgtttatatctcattggtcactcctgtcttggcaaacgatgatggaactgtaggttttttagcttgagcacattttcggcacccccacagtgttactagggataaatggtgggcaaccagaaaactgtccctaagtcgcttaggattaagaggtaactttttttgttgcttttccattcccttgcctgggtccccaggtccccctggtcccaggtacatgaatattctgcaaagagattgtaacaaaaaaaaagaacattgctgcttgtattcacaagggacgtggcagggatctaagcctgagcttaagctttgtgcaccgtagaaccagatatgtctggtgaaaggtgggccagctaatggcagtcttgtcgccagggatggaagagccacctagaagaactcatcatcctaaaggggaagtaataataacgacatagtaataatgattatggaaggccatcttttccaaagatgatgagattgacactccttccaccaagagggagggtctgtgttccctccctggctggcttcctggctctctcctctcaggattcttgctcttggacctcagtcaccacgctgggaggaagtccacaccagcctatgtgggaaaaccacatagagaggagctgaggctccagctgtcaaccaacatcagcatcaggcatgagggtgaacaaagttttggatgttcccagtcgccagtcttcaagtcatccccaaccttcctgtcttccagctgaagcctcagacaccatgaaacagagaaactgtcttctctgtgtcctgtttgaatatctaaaccacacagttcatgatcataatcatttttttatgtcactggaatttgggggagcttgtttcacaaccatagtcactggatcaatgagcgctaatggcaatagcaactactgtttgttgagaatcattatgtgcttggcttccttcctaggcatccttggtgtgtgtaaggaggctcatttgttatctgaaagggtcagtgcccctagctggtgatcggtgctgagggccaagggagtggagcaactaacacacattgtggatttcacaggaaggaagtgtacttcagctgggccagaaggatgagtggactcagagaggcagagaggaaagggccagatgccagaggcagagaaagggtcatctctcactttcttatgacaattgtatttctaaaaacctcactggtgaaaagagcactgaagccgggaaccattagttgtttcttggccctatcgtgaagcaactctgagccccctctctgaggcctggggtccttgtcaagtttggatggtaaaacctgcctgtattccccacgcatgagtctgtgcccccgcactcagtgggaaaacctaatggggcaccagaggggctgtgtactcacagaaaaaatgttacgaagagaacgtactgacagatgaaactttcaagtcaaccctggggtgatgcagctaacaagagaaagcaattaaggagagagagtggctttccggagcccattttgtatctggggttttatagaggacacagcgttcttatttcaaaggatttttgtcgttgttgttgttatttggcttgccagggaaaagagagagaaaagaattttgaaaatgggatgtgcaggaagacacatttgtggagggtccaaaggggaagtaatgggaaagggaaagatttacatgagctgagtcactaagaaagtaatggtaccatggactgaaaactcagtgagctaacaagtctagggctactgttaacaagcaagattgatcactcatgcaaatgtttccaaggctagtaactctagaatgatcagcaggaaaggaagcttttttttgtttttcctacaagttttagatctggattgagagcttctgttttcttcatgacttggcttttggggtctgcatttagaaaacaaatcacagtatgctcgagctcgaagagacccagcttttccattttacagatgtagaaaccgagggcccaaaaatctcagttggtggactggagagcttgggatttggagacagaactgctatatgtccatgagcaggccactccctcccaaactttggtttactcacctatataatgagcataacggaccatcttttcctaccatgagggatctgggagatttttggaatgggttccaaaatagacagagtgatcttaggatgcatcaatagagatgaacactctagaataatggaggtgactgtcctactcaactgtgcactggtcagactacgcttggaggtctagtggggctccatgcttgaagaggggtgttgggaaactagatcatctctatagaggaaggaagctcctttaagaaagagcttgaaacatgtcttgtgagaaacagacaattttgggttctaaagagaagactcagagagagggacggaagaactttcctcaaatctctgaaggcataagggatgagatttattctgggaggtcccaaggactggtgagtaagtggcagactttcgcttgactcaacccagggcctgggtcatcgttggccccactgataatgatagctgatatagttctcggtaagggtaccaggaaggactgcctcaaagtttcccagagatataatagactgcttccgaaaggggctggcttcctgggtccagaaacattaaggtagaagagtgaaagggaaccaagagctaaaaaaggagaagaacagggcaaactgtaggaccatatagtaaatctttcaggcaggactggctatataagttgaggggtccagagaaaaacaaaaattcagctcttgtttaaaaatgattaaaaatttcaacatggtgaaatcaagctgtggcatctcccaagcatggggccctatgggttgcactgccctggtttcagatttcgtgggccatgtggtctctgtcgcgactactcacctctgcccttgtagctcaaaagctgctgtagaaaatgcgtaaatgaaggggctatggttgtgtctcagtaaaactttatttacaaaaataagtggcagccagattgtaaaaacacgattttggctcatgggctgtatgcagtttgcagaccctgtgtagagtcctgggtcatcagagccgtcttgggctggtgctgtcccgagccatgtctggacggcctcggtttcacgttcgagccagtacagactcgctctccttacctacttctcccacctgggggaaaatagctctgagttgagtcccatatctaactgggattccttccacccgacttgattatccatcagacaatgagaatgagtaagtgaaccccaagttgccatactcccctccaagagcagatgccaggacaggggagactggcccttgccatactcaggtagaacctgctttgcttcccaggtgaaagaaaagagatggaaaattttccagccttcaggaccaacagtgaaaactccctgttcagagaccatgctggagcaggctctggggaaggggcgtgtattcttgtgggtgggaacagcgtttgctgtttactttcagcaaggcccagggtgggcctcagtctctgagaatatcaggtgctttggcattcagaacgtcttcatgaattcacagagtcctgacacttgggcggggctctctgggctggggtttctgcatgtctctttgagctctgtgatgtataccccagaccaaatggatgttccagagactgggtgccctgaagatgagcccttggttctgtctgcaacctcattctgcagaattcttgaggggtgaggatgagagataagtcatcatttctccttgtctctgtctacttagcctcccagaggatcttggtttgagtcaaaaagagctggcttcaatttcatctggcctaagcctcagatgtgagccacacacgctgccctagagattcagagcacgccccacctcatacaccacactgccttttttgaaaacaggttgaactcaactcttctgcattgagggaagctttccaggggctatattttcattcaacacatagtgacttcatgctggtgtttttcctaggctcagtggatgggaaacaaagatgaataatgcatgatttcaacaaacgcttactgggtgtgcagcacatagcagatgctgaggataaaacagtgaagaagacttgaaccctgacctggtagattgcacagttctgctggggaggcagacaagaaaaaacagtgatgaacagagggcctggcacgctgcctgctggggtaggcaggtggcaaacactgggaggaagccctaggatcacggacggacatggctcctgcctgggaggatttcccagtctcgtagggaatgagggaggcccttgagcacccccagatccctgcagcgtgtgctgaagttccatcgagtcagtgggggaggtgaacactgccccagagcactgggtgttggcctctggggaacagagagagggagcttggggaacagacagaggaagttggagggtcattttcttgcagggaaataattattgccctccttccctgcgatttgtagaggagggcagcttttaggaataatggtgtgttaggggttgaactgtattccctcaaaagctgtagaagtcctgacctccagtacctgtgaataggaccttatttggaaataggatctctgcagatgatcagagttaagatgaagctattaagtcattgaggttggctggaatccaatatgactggtaatattagattccagccaatataatattcttataaaatggggaaatttgaatatatagacacatacacacacacaaacacacacacacacacacacacacacacacacaaaacacaatgtgaagattggagttctgctgccacaagccagggaactaccagcagctcagagagaggcctagaatcgagcctaccctggcgccctcagaggcagcatgactgcccaccttgatctcggatgtccagcctccagaactgtgggacaatccatttctgctatgtaagccccgagtcggtggtcatggcaaccctagcaaactaatacatgctagaaggacccaaacttctaactgtattcgtttcctattgctcctgtaataaccataaatgtatcttaaaataacacagatctattatcttacagttctacaggtcatgagtcctcaaatcaaggcatcagcagggctgcattccttctggaggttctaggggagaatctatggccttaccttttctagctttcagaggtcacctgtgttccttcttccatctccaaagggcatcctttcaacctctgctccaaatcaggagctgtgatccaggttctcacctcctctctgccttttctgttccccgtcaatcccacacttttggtcaaccaggggttcctgtgcttcttgcctgttggctgtgagttccttgattcctttccagcccacagccactggctccgtggaaatcctggggccccatctctagggctgtccatccagatagtgaagacactgctggtccccagctgagcagaacctgctggtcagccaacatgcagctggcgcccaaactcactttccctccctctctttctatgtgtgtgtcatgtttgcagctgagaagcagatggggggctttatttaagggggaatttccaactgccagtgctctctgggaatagtacagggtagggtcctagggtagctcacttgaagagggcaggatcctgtagatcttaagagcttgggcttttgattcaattgacctgagagaatctgctagtcataaggtgtatgaccttgagcctcagtttacttgcctgtaaaataggaatgataataataggatgatgtgaggaccatgtcaggctcacaaactgaaatgccctcaaggtaaatgaatgacacaggccaggcggaagacacccacagcctcattgatcatctcttttttgatagacatggcgatgagaaacacacctttcttttgagctataggaaaaccgacagggcaatcattaccataagaatcaggggctgggcacggtggctcatgcctgtaatccttgcactttgggagacagaggcaggcgaatcacctgagatcaggagttcaaggccagcctggccaatatggtgaaaccctgtctctactaaaaatacaaaaattagccgggcgtggtggcgcatgcctgtagtcccagctactcgggaggctgaggcaggagaatcgcttgaacctgggagacagaggttgcagtgagctgagattgtgccactggccactgcactccagcctgggtgacacagcaagactccgtctcaaaaaaaaaaaaaaaaaaaaaaaattcagggatgcccagcctcagtgtggggagacaacaaggagaagtggggactgtggaaaatcggagatcacatgcccagctcactccaagaggagtgggggttgcaaatccagggatggggcagaatggcccagcctgagaggggacctgtagtctggggctgtgacctcatgggctttaaagaatttcaatgcccaggccacaccccagaccagtgatagcagaatgtctgggttagaacccgggcacctgtaatttttaaagctcccctccagtgatttcctagttttagaaccactgtctggcagtggggaggaggcggtcagaccatggggctcccaggtggttgggccagggagagactgagggaaagaaggagttgttggtgggatttgggggtggagcaccatctgtctgccctgcagtgcgactcctcaccatcttcataaaagcttcacaagttcaacatgcctgttgtcattggattctggaaaaggggctgagtttagcatcaaatgatgggggagggaggctggaacagctactgtgaataagaagagcggctgcttcggggggaggagaaggctgatattcttgtggcattgcctagttgtggtgggtctttcacggggaaaaacacaacctttttcaaaatccaggcaagaaaagtttacagaatgtgcatctacacagtgtggggcttgcaatgccacactgaatcctggtggattgaaaattagaaagacagagcctttgggagttacagagtaagcaactgacattaggagcaaatgtgcagggttagctgccaaggacctgaaatgaaataaaatgcctcaaccacctccagcttggtcaactctagcttaaagttcaaccctgcctcaaaggagatgaagataatggcatgtgtagaaaatgactgtcagaagtttaatagaatgtttaaacaaatgggatcttggtcacctcaaggaaaagctgtgagacattcaatcggatcattaaatagaggcagtgaaggagaatgactcattaggttgcatatatctgatgaacttggcacctctgccaggtaaataaaaattactctcatggaaacaaaacttttgtggtttgctattggtctttattttgttttgctcagatatgtgaggctctccccgtaatatttcatttccacatgctgtagggttggtgtggggtttaagagaagttttaatttttgtcagcttgcatatttacctccattgtttatttgtgtgtggtaatgtaggaggcattcattttattagggaaaatgcaatgtcacttttttttttttgagacagggtcttgctctgtcgcccaggctggagtgcagtggtgcactcatggctcactgtagccttgacctcctgggcttgaatgatcctcccaccccagcctcccaagtagttgggaccatgggcgcataccaccatactcagctaatttcttttttttcttctttttttttttcaatctttttgtagagaggaggtcttgccatgttgcccaggtcggtcttgaacccctgggctcaagtgattttcctgccttggcctcccaatgtgctgggattacagatgggagccactgtgcctggctgcaatgtcattttaatagaccttaattttatctttgtttagtggaccaggtagaatggtcctgctgtgtggtttcctgcagccaagggggctggggaaggaggtggtagggttggggaaaagaagcaggaagtaggcgtctggctctgcagaggtgaggaggagaaagtggctctgcggttggtgcatggagaccaatggaaatggaagaaagcttgcaaactgagcaaggagggtagagccagaataaaggaagcaacatggagggagaagcaaagcctcataacccaccccaggcaggcttgctggagtgccatggatttaactaatgggttgggacaggacaatcttttctttaatagagctaggttaactgggaataattgagcccatggaattttcaaggtttctgaccatatgttctgaagatttcactgtacgaacccctccagagaccaaaaggaacttgtggaagacactcattcctaggaaatgaataagaattaggaataagttgttgttgtgaatttagcttttggaacagggcctggcacccagtagagactctatagatacttgttgattgactgcatgaaggtaaggtcacactgattcatatatggagtgaataaatggagataatttcacactgattcatatctggaaagaaaattagagcagaagtgctcaaccgagaaattctgtgaatgaagaatgttggaaaaaattgtgccttgttgtatgtgttcatgcgagctattcaggtttgaacccctggcatctctgcatttgtttctcatggagagaagaagacaaggattgtgaatgtgggcctggctccaatcaaggtgaatgtctgctccaagagcagggaggtggctgacagccaatccgctttgcatgtgctgcctcttggttcttccaaagctggggtggctattcctatgcatatgtaatgactcgtgtcacaggggagtcaagaagtcccggcagctttcagctggattctgaatacttttgaattgatatttaaggccatcatatttacattaaacacagaaaatcttgagatttgtgtttttgaaaagatgaggtatacattgggtcgtataaatttggattcctcctagcttttacttactcagtgtgacttcaggcaagttacttaatctcaccatgtgtcactttcctcctctgtaaaatggggtgattgtttcccaagtcacaggattaagggagtaaccccatgagttaacgaatgtaaagtacttataacagtggcggggagtccaggtattagttagtattgttattagttggttcttgcactgctgtaaagaaataccggagactgggtaatttataaagaaaagaggtttaattggcccatggttctgcaggctgtacaggaagcatagcagcagcagcttctggggaggcctcaaggaacttacaatcatggtggaaggcaaagggggagcagacgtcttacatggcaggagcaggaggaagagagagaagaaggggaggtgccacacactttttaacaagcagatatcacgagaactcactcactatctcaacacagcaccaaggggaaaatctgacccccgtgatccaatcacctcccaccaggccctacctccaacattgcaatgggattacatttctatgtgagattacattatgtgagattacatgtaatctatgtgagattaaacgtaatgggattacatttctatatgggtggggacacagatccaaaccatatgagtattgttgttctgtttttttttttgtttttttgtttttttgttttttttttcttttattagtatactttaagttttagggtacatgtgcacattgtgcaggttagttacatatgtatacatgtgccatgctggtacgctgcacccactaactcgtcatctagcattaggtatatctcccaatgctatccctcccccctccccccaccccacaacagtccccagagtgtgatgttccccttcccgtgtccatgtgttcttattgttcaattaccacctatgagtgagaatatgcggtgtttggttttttgttcttgtgatagtttactgagaatgatgatttccaatttcatccatgtccctacaaaggacatgaactcatcattttttatggctgcatagtattccatggtgtatatgtgccacattttcttaatccagtctatcattgttggacatttgagttggttccaagtctttgctattgtgaatagtgccgcaataaacatacgtgtgcatgtgtctttatagcagcatgatttatagtcctttgggtatatacccagtaatgggatggctgggtcaaatggtatttctagttctagatccctgaggaatcgccacactgacttccacaatggttgaactagtttacagtcccaccaacagtgtaaaagtgttcctatttctccacatcctctccagcacctgttgtttcctgactttttaatgattgccatgctaactggtgtgagatggtatctcattgtggttttgatttgcatttctctgatggccagtgatggtgagcattttttcatgtgttttttggctgcataaatgtcttcttttgagaagtgtctgtccatgtcctttgcccactttttgatggggttgtttgtttttttcttgtaaatttgttggagttcattgtagattctggatattagccctttgtcagatgagtaggttgcgaaaattttctcccattttgtgggttgcctgttcactctgatggtagtttcttttgctgtacagaagctctttagtttaattagatcccatttgtcaattttgtcttttgttgccattgcttttggtgttttagacatgaagtccttgcccatgcctgtgtcctgaatggtattgcctaggttttcttctagggtttttatggttttaggtctaacgtttaagtctttaatccatcttgaattgatttttgtataaggtgtaaggaagggatccagtttcagctttctacatatggctagccagttttcccagcaccatttattaaatagggaatcctttccccattgcttgtttttctcaggtttgtcaaagatcagacagttgtagatatgtggcattatttctgagggctctgttctgttccattgatctatatctctgttttggtcccagtaccatgctgttttggttactgtagccttgtagtatagtttgaagtcaggtagtgtgatgcctccagctttgttcttttggcttaggattgacttggcgatgcgggctcttttttggttccatatgaactttaaagtagttttttccaattctgtgaagaaagtcattggtagcttgatggggatggcattgactctgtaaattaccttgggcagtatggccattttcacgatattgattcttcctacccatgagcatggaatgttcttccatttgtttgtatcctcttttatttccttgagcagtggtttgtagttctccttgaagaggtccttcacatcccttgtaagttggattgctaggtattttattctctttgaagcaattgtgaatgggagttcactcatgatttggctctctgtttgtctgttgctggtgtataggaatgcttatgatttttgtacattgattatatatcctgagactttgctgaagttgcttatcagcttaaggagattttgggctgagacaatggggttttctagatatacaatcatgtcatctgcaaagagggacaatttgacttcctcttttcctaatgaataccctttatttccttctcctgcctaattgccctggccagaacttcaacactatgttgaataggagtggtgagagaaggcatccctgtcttgtgccagttttcaaagggaatgcttccagtttttgcccattcagtatgatattggctgtgggtttgtcatagatagctcttattattttgaaatacgtcccatcaatacctaatttattgagagtttttagcatgaagggttgttgaattttgtcaaaggccttttctgcatctattgagataatcatgtggtttttgtctttggctctgtttatatgctggattacatttattgatttgcgtatattgaaccagccttgcatcccagggatgaagcccacttgatcatggtggataagctttttgatgtgctgctggattcgttttgccaatattttattgaggatttttgcatcaacgttcatcaaggatattggtctaaaattctcttttttggttgtgtctctgccagcctttggtatcaggatgatgctggcctcataaaatgagttagggaggattccctctttttctattgattggaatagttgtagaaggaatggtaccagttcctccttgtacctctggtagaattcggctgtgaatccatctggtcctggactctttttggttggtaagctattgattattgccacaatttcagagcctgttattggtctattcagagattcaacttcttcctggtttagtcttgggagagtgtatgtgtcaaggaatttatccatttcctctagattttctagtttatttgcgtagaggtgtttgtagtattctctgatggtagtttgtatttctgtgggatcagtggtgatatcccctttatcattttttattgcgtctatttgattcttctctctttttttctttattagtcttgctggtggtctattttgttgatcctttcaaaaaaccagctcctggattcattaattttttgaagggtttttgtgtctctatttccttcagttctgctctgattttagttatttcttgccttctgctagcttttgaatgtgtttgctcttgcttttctagttcttttaattgtgatgttagggtgtcaattttggatctttcctgctttctcttgtgggcatttagtgctataaatttccctctacacgctgctttgaatgcgtcccagagattctggtatgttgtgtctttgttctcattggtttcaaagaacatctttatttctgccttcattttgttatgtacccagtagtcattcaggagcaggttgttcagtttccatgtagttgagtggttttgagtgagattcttaatcctgagttctagtttgattgcactgtcgtctgagagatagtttgttataatttctgttcttttacatttgctgaggagagctttacttccaagtatgcggtcaattttggaataggtgtggtgtggtgctgaaaaaaatgtatattctgttgatttggggtggagagttctgtagatgtctattaggtctgcttggtgcagagctgagttaattcctgggtatccttgttgactttgtgtctcattgatctgtctaatgttgacagtggggtgttaaagtctcccattattaatgtgtgggagtctaagtctctttgtaggtcactcaggacttcctttacgaatctgggtgctcctgtgttgggtgcatatatatttaggatagttagctcttcttgttgaattgatccctttaccattatgtaatggccttctttgtctcttttgatctttgttggtttaaagtctgttttatcagagactaggattgcaacccctgccttttgttgttttccatttgcttggtagatctccttccatccttttattttgagcctatgtgtgtctctgcatgtgagatgagtttcctgaatacagcacactgattggtcttgactctttatccaatttgccagtctgtgtcttttaattggagcatttagtccatttacatttaaagttaatattgttatgtgtgaatttggtcctgtcatgatgatgttagctggttattttgctcgttagttgatgcagtttcttcctagtctcgatagtctttacattttggcatgattttgcagtggctggtactggttgttcctttccatgtttagcgcttccttcaggagctcttttagggcaggcctggtggtgacaaaatctctcagcatttgcttgtctgtaaagtattttatttctccttcacttatgaagcttagtttggctggatatgaaattctgggttgaaaattctttcctttaagaatgttgaatattggcccccactctcttctggcctgtagggtttctgccaagagatctgctgttagtctgatgggcttccctttgagggtaatccgacctttctctctggctgcccttaacattttttccttcatttcaactttggtgaatctgacaattatgtgtcttggagttgctcttctcgaggagtatctttgtggcgttctctgtatttcctgaatctgaacattggtctgccttgctagattggggaagttctggacgatatcctgcagagtgttttccaacttagttccattctccccgtcactttcaggtacaccaatgagacgtagatttggtcttttcacatagtcccatatttcttggaggctttgcttatttctttttattcttttttctctaaacttcccttcccacttcatttcattcatttcatcttccattgctgataccctttcttccagttgatggcatcggctcctgaggctactgcattctttacgtagttctcgagccttggttttcagctccatcagctcctttaagcacttctccgtattggttattctagttatacattcttctaaatttttttcaaagttttcaacttctttgcctttggtttgaatgtcctcccgtagctcagagtaatttgatcatctgaagccttcttctctcagctcgtcaaagtcattccccctccagctttgttccgttgctggtgaggaactgcgttcctttggaggaggagaggcgctctgctttttagagtttccagttcttctgttctgttttttccccatctttgtggttttatctacttttggtctttgatgatggtgatgtacagatgggtttttggtgtggatgtcctttctggttgttagttttccttctaacagacaggaccctcagctgcaggtctgttggagtaccctgccgtgtgaggtgtcagtgtgcccctgttggcaggtgcctcccagttaggctgctcgggggtcaggggtcagggacccacttgaggaggcagtctgcctgttctcagatctccagctgggtgctgggagaaccactgctctcttcaaagctgtcagacagggacatttaagtctgcagaggttactgctgtctttttgtttgtctgtgccctgctcccagaggtggagcctacagaggcaggcaggcctccttgagctgtggtgggctccacccagttggagcttcccggctgctttgtttacctaatcaagcctgggcaatggcgggcccccctcccccagcctcgctgccgccttgcagtttgatctcagactgctgtgctagcaatcagcgagattccgtggggtaggaccctccgagccaggtgcgggatataatctcgcggtgcgccgttttttaagcccgtcggaaaagcacagtattcgggtgggagtgacccgattttccaggtgccgtccgtcacccctttctttgactcggaaagggaactccctgaccccttgtgcttcccgagtgaggcaatgcctcaccctgcttcggctcgcgcaaggtgcgcgcacccgctgacctgcgcccactgtctggcactccctagtgagatgaacccggtacctcagatggaaatgcagaaatcacccgtcttctgcgtcgctcacgctgggagctgtagaccggagctgttcctattcggccatcttggctcctccccccgtttttttggttttttttgagacagagtctcactctgttgcccaggctggaatacagtagcatgatattggctcactgcagcctctgcctcctgggttgaagcaatactcccacttcaacctcctaagtcgctcctaagtaggcatgcactaacatgcctgtctaattaaaatttttttttttttgtagacggtctcactctgttgctcactgacgctggtcttgatcttctgggctcaagcagtcttctcacctcagcctcccaaagtgctgggatcacagacgtgagctaccgatcccagctaccattgttcttaatcaatggtatcaatgtttttttaaatggaggaagaggtaacatttgccagttatatctttgttgaatgcacgggctctgaggattagacaccaggcattgtgctaaacacatcgtatccgctgtcactggatcgccaccatgactctcagaagaaggtgggtgctactgaggttcagagaggtgcagtactgtgcctgctggaacacagctgctaagcagtggtgctggaatttgattgcagtgaggccaaggcttttccttaggcctcagggtggttctgaaagggatcaggatgacctgtggtttacaactgagacgacctttgggtggggagtagggatcagcctgtgggagtggggatccatgtgctggattcctcttgggtggaggggcctcacttggagtgtgagattggggatcatggctttaattgggcaagcagtctctagactgtcaccttggtaagtcagttcctcctggtggagagggggcagctcttggagctgcagccaggaggaaagttgcttgggtgaggtccaggtgggcagagctgaaaccaatgtggtcaggagcccagaaggcagagcatcaaaggagcccagggcatcaaagctgccatgtgtgggactagggccggcaagagggcacagtggtggaagcggcagcagtggccaccagtgtctggggtcaaatttaaaacaatcatcaaaaacaccaacccctgaagccctcaggtgttggttgatggtaagatatttttgaacccaggtgagattcccttgggggagtcctggaaattgggacgcaggtcccggtggagggagggcctacattcagcaaaaccaggcagtagcagagaaacatggtaggtatcttttccccatttcacagatcaagaaataaaggcccggagaattgtagcaacctgctcaaggttgatctggtagacagtggaagaacttgctcattaattcaagcaccacatgttttccatcttttgaattggccattaatccattcagcaggattgtagactcagagtaatacgcggatctaagcaggatagagtggcagggtagaggggtagggacacgaatgtagatgcaggattaaaatgcaaaatgctgttgtgatctgaattgcttcttcaggaaggcaccctgggcttcaacagggttagggaactggaatctgcagccaggaggctgtgggtctgtatcttccaccctccctctccaaaggtgggcgaggataggagtggatgtggctccctctcagagaggcgtggcttcgatgttgggcagtgcttctctgggaagactgagaagttcggtaacagtgcctgggactgagggtgggctgagggaggggagcatcttggggggatagcaggaactgtgggtgccttgtccctatcccctcacccttacggtgtccaggtgacccgatggcctgattccctgtgcctgacactcaatgtttccctgccgagggctttccttgggccctggagcctgctttggggaattactgccctgtgggagaagccagcaaccactgactgttgggaattggtgtattataaatatatacacccgagctccctcacccttggaagcctggggagatgagtctgaggcatgtgcttgacactgccgcctagaggcccccagcagggtcacaggccagtcacctccaggggcggttagcttgatcaacctttattttcctatatcagttccctaccccctctcagtcttccttgcgcctttcatataagctactttttctggaacccttgtctgaaggtctcctcctgggatacccaaattaagaaactctctattctaagacctggccactgattcccctttaaatgctccgttggtacttttgtcctctccttgtgacagtagacctgttggaatatatcctcactgttgacttgggaacttggattatttcttcctgggcaaccctgccaccaggccatcccagttccctctggcagcccagcacacagggcattgaccatgcatttagaacagtggatctcaaccaggagcaatctggggacatttggcaaaggctggagacacttgattgtcatagaggtgctcctgatatctggtaaatagaggctgggatgctgctggacattctattctgcacaagacagccccccacaacaaaggattatccagtcccacagtcagtggtgcagaaatggagaaaccctgttttagacgatggaagcctgtatccctggcctgattcttgggagtcccatgctccaggacagaccatcaacaacagaagcagccctggagactcacccaatggcacccagcgaggtagctggggatggaggagacccatttcttgctgagaatgtgccagcatctttgaggtgctaaggaatcagctgggaggaatctcagagaagtagcaccacaaccagataagttttagctgcctgattgtacaggtgtgagtggcaaactcaagatattacaagttatgtaaaggaaatagcgcattttcatctgcaatggaaaaacggaagctgcctgatggagcagctgtggctgtagcagccaccaccagccccaggcttggctactgtgggaggctccactatttgcatttttatgaatctggagttaaagtggctgtgaagatcaaccaggacaacaggccagaagggagggggtacagtgaaagcccatagagctagagagaagagacagtggtttctgcaggagctgggctctgatttggctttgttttctctcccaccatggcttcaagctcctctccaccccttgttgaccttctgggctgagcctccagccttcggttctcgttggagaattggaacagactcaatttcaggcttaattaagaaaacccaccatagggcatccagcaggaagggcccccaggggctgcctggggaggtggaggtatggtaaatatctgggtgccagctgcttgggtgtgtccgtatgtgggcatttctgcagctgttcatgtgttacaccagcacttctcaaacgtttgtgggcttgtgactcaccagaggttcttgttaaaatgcagatggtagggcctgagactgcatttcttccaggctctctggcgatgctccatttcagatcacgctttggacagcaaagtgtcacacttcaattaaaaaaaaaagaaagaaagcccagcccattacaactttaatttaatttcattttcagcaccaagcaatctcctctcctcaggtgaggctgcccctgctgggaactgaagcggggagggctgtggtctcatcattcaagttgcagcttcttttttttttttttttctgccatggcgtcctggaagaggccgaaagatgttttcacacagccagtgctgtctgggactgctctttgtgggtggacaaatggctgacaccccaacccaagctccccttggagaatgctctataaggacctctgtccaaccctccccaaatgcactcttggtctaattgttggtcctggcccaggctacacacccctgggactcccagagtctggcaggctgccctccacagagtactggtgcctgggaataggcacataccctgggtgtcttagtctgctcaggctgccataacaaaataccctagactgcatgggcttaaacaacagaaattctatttctcactgtgctggaggctgaagggccaagattatccaggagctggccaggtggtttaaggtgagggctccattcctggcttgcaaacaaccaccttctcattgtatcctcaggtggcagggagagcaagtgagctctcaggtgcctcttataaagacacgaattctattggatcagattcccaattttgtggctttaattcaaacacagtcacactgagagttagggcttcaacataagaatttgggggagatgcaatttagcccctagcattgggcacgtcacactagcaggctgctctcctggctctgccgttgtaggcggctcctgccagccaccagccttaggcttaccttgcatgaccccatgccccacccccacccccccaattcctggacactaatattaggcaccatcaagaactccatgaactttgttgacacttggggtggcctttgggaatctgcagctcagtagaaatccggcaagggagaggacggctacgtcctcatcctgcaagccctcgccaccagcctacccaaatagttatcctgggcttcccctcacttggcttgggaggcagaggaacgaccccctcttctcgcacccatagggaaatgctgtggtacttgctaccggagcaaattccctccaaaaatctctagccttcccttacagaggtaatggcaggtgatgggtttgacagttaagtatcccatttgactatcttttaaataaataagcacttacatagcacttgctaaatgccaaaagttgttctaggtgctttacatcttatttaatcctcatggtactcctgtctgatagctatgattattaaccttattttacagatgaggaaactgaggctcagggaggttaggtaacttgcaaaagtcacacagcttgcacatggcagagtgaggatctgaatcccagcagtcaggcctgcaatcactgctctctgtagcctctcagaggctgggatgtaggtgttagcatctctctcagaagagaggaaaatgaggcttaacaggggaaataatgttgctgagtttacatagctccgaagtggcagaggccaaattctaacttgggccgatgactcaaaatccactgctcctcgctccagggttatatgttaaacgtgtctttctcacctacttcccccaccatttggacttttgaaaactttgaagcacaatcagacatagagaacagaactacttcccaacagactgtaatgtgcgttccttaggatggaggtctctggggatctgggaatgaattccttggataggtttccagaggaactatccctttagagtcctagaacaaggatgagcagggatttgtccttcacacacttctctggagctcttgtcagagtgagaattttcagaagcctggagcacccaggccacccaagcccccatctttcctgtgctctctactgcctagcaccctactctcacacccctgatactcacaccttccatccttagacttgactcttgacaaaaggactctggctttccagagtctcagattttacagacaactctgaaccatgccgtcctctgtgacaagccctcctaacagtaataacaacaccagctgctaacaaatagcattaaagtctcagctcaccagacctgtaattcagctccctgcttctttactctgttgatcattctaaattaaaataagacaggccgattgccaatttaaaccttctaaagcattagctcatgaccatttaaaggtgtgacatcacctggcccctggtagaggctctgtaaatatttgtggaactaatgggtaaatggacttacgaaggacatttgaacagaggatcctgaaagacgccaaagccttccctagaattcatctccggtggtggcatgacagccactgtggttcagggagctggcggaagttcagcaacctcacctccccaccccaggcccctctcccaccttgcaggctgaggcagcttttgaatgatataataagtagaagtgcttagctttatgctgggctgtgacagctgccacagatggccacctgcttcctcggttcatgggcctccctgcccacaggaggtgcatgacatgtcctcagtcccctgacaccatagtcaacacatccaaagcccttctgctaatttctggctgaaatccagatggccagcccactcatctggccattgtggactgtctgtcccagcctatccccacatgacacccaatccgtcacctcaatttgcacaccaccaactcactagcactgagtactcatcaccctaattactgtcatggaagttgttggtggagtcgctgaaggggttacttcgccaaacccatgccttcctcccatctgctcgatcctcttttctcattttacttccctttggggagcagaaggatgcatttcctccttggtttccacgtggaatcatttcttcccttctgccccaagtacaactttaacatcaagcatttatcaagactttccaaccaggccttctcaaagtgtggtccccagaccagcagcatgagcatctcctggaagccggtcagacatgcaagttctcaggcctcaccccagacctactgacttgggagctctgcaatggggactggcatctgttttaatgtcctgcaggggattctgactgatgctcaagtttgaaaagctttggtccagacagcaagtatgctttcccttgggagatttctggcgaatcaaaacgtcttcttgttaagaaagtttcaaggggagttgggctttgtgggaggcagctcagcttcttcctattcagccaacagagcgtggacttcggagtcatcctgcctggattttggtcttgctgtctgcgtcttatagcctgttcagcactggggagggtggtttacctcgctgggcctaattttctttctcaaatgagtcttcattttaccttttctcaggactcttgtgagtctcaggggagattgaagacatggaggtcctttataaaccagaaacctgggggtgggggtaggggctaccgcatgatctttaggcacgtcccaaggtgggggcaccagtggtgtctctctctctctcttcctctgcacaatctctgggtgctgaaagcctgggtcttctgttgacgaaaaaaggagttgggtgtggggtgcagggcctgttgggaaactgggtttgaagacagtgagaggcatgctgagcatgggccagaagtctccctccacacctgacctcaggctccctgggcagctgccctgaccctgcaggtcacactgtctaggaaccctgagctgaagggagaagcaaagaagagtgtaacgtggcactgtgcagcattcttcccatatattacctcattcataacccagattgcaggaaaaggagagaggggagaaaggagagggtagaggggagggaggagagggataatacactgctccagattgcttgatgcagaaactgaggctgaaaattacccactctccattagcctagcaaggtacagcacttttcattatcctgagctccttttattgttgcactcctgcatatataaattttccataattataatcccaacctctataggcttttcttttttgaactaagcatattaaaaacattctctaagatgctacataatcttcaaaattaccattttagatgactctcaaatatttcattaggtggacatattataatttgttgaactattttcatactgtggacatttagattgtttttgtaactttttttggtgccgtcaaattatgttgcagtgccaatgtctttgggcatttagcttttaaagtcttttagaagaaatactttggagtgtgatcattgttgggttatagggtatcagtcattttatggttcaagaaacttactttccaaaataccctgccactagcattatttgaacttaccagctttgctgcaaccttgccagcattgggcattattgttattcattggttttgctaatttatagctactatgtgtcacatcacttgcatttctttagtacttagtgatggcaaacattttttttctgttattttcttatttttattccctcctggggaaatcttcacctcctgtcttttgcatattgtcttaacattatgattgtttggataagctctttatgtagatattggctctttgatgggtttgtttgcttatttgtggtaatattcttccctcagctcaacctagtttttaaaccaagagctgtaatcacataactctgtgtacctctaacttatgatgcttgataaactcatggcattgccagaggctgagcacttggagtattggaagtttaatttgcaatgaaaagaattggcaatctggacaggggtgcatttctgagtgcctgatgtcttaagtgcagtaccaactgtggcagtttggcattctcccctcctatgccctgagtttcccttttcttctcctttcttctaactctagctggggatgaatccaaacaggcatcccgcaaataaatagcaagctctgttgctgccataggtcactgcaaaagaaacgactgttggaatctaacttcctttactaccttttgggacaccctcctacacccctcggtatcttttgggttccctgggacccaggtaaagctgactctctctactcatgactgcctatttggtcaaggagtccactgagtcagacggtttcagggaggctaagaaaggcaatctgaatgggagtgttagtgcaagcttccaccccacattttatgtgatgactttgatgtcaatattcccagagcaactcacagaacacaaccattgtagtcattgattactggcaactttataactcctataactttagtctgcatcagaagcaagggactttgtgagcccatatgcccaggaacggatggggaatagcttgcaggaaccaaggccccagagaccagagcaggggtttggtggtaccaggatgctctctgtgtcactccccatctccctagttgtctgctaatctccaaagggctccatttcttcctgctgccaacaggctatctctacgcagcaggaaaaatggcctgtcaggtcttagcttccagttcttctgacaccaaggcaaggctccggtcccagatcaccacaagcatcatctcaatacgcactcagggactcctcctagaaacttccagcagcccagagaggacccacctggaacatcactgggtgactaaaaccctgaaccataagtttaatctatgctagagtaatacagtttttttctcaaagaaattttaaaaaggttccttgtgaagaggatgaaatatccaacctcctcaaatggacagtgtcaattaaaatgcccaagtcttcagccctggcctccctgctctgagccttctttccctccctagagccaccatcgcacccacaaagtctctgaagtaaagaaagtttggtctaaatctaatctttgccattcagttgccttggttagccagttccatacccgcttcggacctcagttttctcatccaaccagtcttcaggtgatgcactgaaacagagatggggcgacattcatgagtgacctctgctaggatcaaagtaaaactcaccccagtgggtcacactggatttaacataaaccaagtgaaaatcgcacccagcatttacaaggactacatctctctgaaaaataaaatcaaaactgtaaaatgaatatgtcatattgtaaaaattgctcagcaaaaaatataactgcagactgtctattgtgatagagtaacctgccagtgtctgttttgttgccaagttttccttttgctctgttttagaacaaaagctgctccagcatcgatttgtcactgagcaatcttcctggatagtcccgcgggcaggctcgatgattacgtgcaatatggagcattgtcttgtttttgtgagccagcgagtctagtcttttcccctctgttgtgctcaactgtccacacaacaataacagtttctaaaactccctgacgtttaacaaatttaaccactgagactgcccatgaggcaggtaagatagggactctaatccttacttggtggctgagtggactggggtttagagggttaagaagcttatccaaattaggatgcaggtagagtccaagactggctgaggagccagagtccttcatatagcccagtcactactgtctgagctccaggccacaggggtgtgtggttggtcagcttgagttctcacgcacccctccctctgattggtccactcgagctcccagatgctcctctgggactgccccaggcctttggcacctctgaacttatgaagcagaggaggtgggaaaaggatcagtggctggggacttagtgacgtgttcctcatcctgcctttatgttactttgttgtgtgacctcaggggcaggtcatctcacccctcagaggcttgggcaggtgagatccagctcagtcttaagctagatgaagttgtgcagaggatcacttgtggccctcaaccatttcatcatttctttctgccttgtcctcttgaagatgatgcctctgttagaactggcctcagcttgctgtggtttagaatcttttagatgctttatgtagcgttttcatttcttttctcattgttaaccaccacttcttgttactatcatctgcctccaaaacttctgtcccctcttaattcgttatatctaatctgctgtgatttggaatatcagataactaatcttgttaaaattttgtctcaaatgtgagttacggctatgaatgaaggctttggtgattgcgctgtgtgatgacaataactttgactttttcaaagccttttttggcttttttcaacatgctgagtaatgaaggatgaaattcccacatcagttttgacatttgaccataggaggggaagtgtgaaaagcatggctctgagggtggaagtaatggtaggtgagatgtgtcattgcaggttgccctgtgttcaggggcagtgtgatgggcaggagatgcatgtccctggaggctgatccagactctcttccatgcatcaccaggcccaggtgatttctcctttcatgtttgcaaacagctaaaaaccttgaccccatggagtttcacttcaagccttggacttagacagctggcacttggtggtggattactaagaagtaatagccactgtagctgaagtcatagatcatgagttgaattgaaatgtgattaactctagggccagggactttaaaagagagatcttccaatcatctgaggctcacatgtgctaaaaaaaaatccaaatttaaattatctaaaaaagatcatcatggttatttataatggcaaaaaatcagaaattaattaaggtgtacatatatctgtaatagaatgccaaacaataatcatactattttaaaagtatttctaatattgtaggaaacagctgatgatataaagtcaggtgaaaattgttaatataagatgatgtcacatgtgaaaagttatttgtataggcaaaggacaggaaagatatactcagtcattataacccctttgatgactataggagccagtggttagtgacttggaccagttgtaatacaatagggaatggtggagaccgagacaaattggagagaacataccctctgaaaaaaagactcctggccaacttttgctgcctatctctagctcttcaagtttcttaatggaggttagaaatcctgatatttatgtgaaattccctaaatattggtaatagtttacacttttaaaagcactgtattggccaaataaaaattatgtggtttggctttggcctttggtctaccaatctactgcctttgaaatacacaaagatgttgacgccagctgcctctgggaagtgtgcttactggaaaatctaatttttctttatcatagctttaacaattttctagttttataggataatatatagtatttctacaattgaagaaaaaaatgaatgaccctaacctcaggtgattgagatgtgtgtgcgcgtggtgtgtggtgggcatgtgagtgctgagggaaaggtatctaagaattctgagcacctcccagaactttctggagcctcagtttcctcatttgtaaagtgcagagagcaattctactctgcttaccatacaagattgagaagcaaaggagatggctaacttgagaggactttgcaaataatgaggtgcactggggatgagcatgaagtaggtgcccaaaaaatatttatcaggtaaatgtggggacagaggaatgaggaaggctggtctctgcagtactgagaagcacatggcattgggtgcccgatgcgtgtgctcaaaacaccctggctctgccccccactagctgtgacaccttggtgagtaatcctaagtataattacaacgtgttgcacggtcactgtacgctaacacttggttaagcacttgtgtgcattatacctttctgagttgaattctgtggaaaatcacagtacaggtatttatttcaaagtgtcactttgaggattcattcagacaatccaaatgccgtgcttgtgacagaactcgataaacagcacttccctttcaattctgggcctggtttcatcattggtagaacctcgttaatttcacctgctcccacgaattccatgaaagtaaacggcctgtaggtatgagtgcgatagattacatattcaaaatatgtgatttcccctttccaacacttattcaaaatatgtatttttttccccctttattcgtttcttacagaagggatgctcattccacccactgagatggctttcaaatcgacagtagaatccagcacatattctgtctttggaaaattgctccaggtgtatcctcagaacaatccagccccgtcgtcactttccacagccactgcttggcacctgcggtagctctgagaggctccgttatgcgtgtggcatcagcctttttttctagcagccttgggtgagtaagcactttcatataaatgaccttgttagattatatatatatttcagtaaacggttagtgtaatttatttcttagggtggagggtattttaaatgctgaactctaatttaggcactttgtatacatcagctctttaactctcacagcaaccatgtaagatggggactgacttttgtgaaattgagtttaatttttttgtggttgctatgaccaagtatcgaaagcaattatcttgaggacatctttttgacctctcccgtgagtgcccgacactgcctcctagagggccccagcaggatcacaagccagtcacccacaatggcagctggtttgatcagcctttattggcaccttctttttcctgtaccaattcctaacccctgccagttttctttgcacttttcatataaggtacttgttcttgaatctttgccaaagagaaatcagaataagggcccacacctctgcctttaggttcccttgagctgtgggagacatcagatcataggctgacactgcctgtgtctagggagataaacaagagttgtgattcattggtcctaagaatgactggattctggggactgctgcctccaaggccatcagtgacactgttcatcaccctaagagcgcaacttgacctcttgtcactgctgtggcctcccttcttctcttgggatgctgtttgctgactatggcagcaaatacccccttcccttaagtctccaaggttcacatcaatttttaccccctgcgatgtggatcgtaatatccgggggggagaggggaggagatattactctattactcctgcgatcttttctctactgccacactggtttaacaccctgggacactgttttccatattctagcaagatgccactactaaaatcacaggggggtatacaccctgcgatattattcgtagtattgtaggggaatgttaatcctgatgtcaaaggactctacccactgtagcctagtaggtagtgggagacccactgtctcccagtagcctagcgggacattagtaagtatgtcacaatgtgtgtgcaacttgtggtgttattcttaatctcctaaggggaagttacttttattgtcacacggggtatgttccttttgatattattcataatatcctagagggatgtcactccttatgtcacagggtttgtacaccttgtcaaattactcgcatgatccttatcagatgtcacttctcgtatcacagaggatgtacgctctgtgatatcatcggcatattctagggaaatgttacttttaatgtcacagagggtgtacaccttgggaaagtattcattatacttttgtgggatgttaaccctaatgtcacacgggatgtacacacagtgatactacgtgcaatattctatcgaaatgttactcgtaaatcacgggtcctgtacatcctttaatattcttcataatattctaggaaaacgttcctactaatgtcacagggcatgtagaccccgtcataagattcgtaatatcctagtgggagttcactactaatttcacaatgcgggtacaccctttgatattattgatattttcctgaagagatgttactactgatgtccaaggcaggtgcattctctgatattattcgttatatccccagggatgtaacttctaatgtcacacggggtgtactccctgtgttctatttcataatatcccagggcaattttacttttaatgacacagggggtgtacacatagtgatattattagtgatattctagaaagatgttactcctaatgtcacaggggtgtacaccctgtgatagtattcataatttcccaggggtctatactcctattgtcacagaagataacaccctgtgacattattcgtaatattctggcgagatgatactcctaatttcacagggggtgtacaccccgtgatattattattactattctagggagatgttactcctaatgtcgcaggtgtgttccttctgtgatattcttcaaaatatgccagcaggaaattactactaatgtcacaatgcatgtacaccttgtgatattattagtaatattcaggggtttttcactcctaacactacaggggtgtacaccgtgtgatattgttcccaatattgtagggggatgtttctcctaatgtcacagggggtgaacacccttcgatattatttgtaatctgatagggagatgttactttaaataccacagtggatgtacacacatggggtacacccactgggatattatttgtaatatctttgagagatataactcctaatatcacagagggtgtaccccatgtgtgtacaccctgtgacattctttgtaatatccatggtaaacattacttctagtaacccaccggagggtacaccctgtgatatttttcataatatcatagggagttattgctgctaataacacagtgggtgtacgccacgtgtgtacactctgtgatatgatagcttatatcctagggagatagtccttctaatatcaccgtgagtttacaccctgtgatatcattcataatatcctagaaagatgttgctgctaatatcacagagggtgtgcccccagtgacattatttgtaatatcctagggagatgttactcctaatgtcacaggggatgtacaccctgttatattattcataatattctaggggggtgttacttttaaagtcacaggagtgtacaccctgtgatgttattcgtaatatcctaggaagaggttactcctaatatcacatgggttatcctaggaagagattactcctcatatcacgctcctaatatcacaccctgtgataacattcagaatctccaaaagggatgttactcttaatgtcacatggggtgtacaccgtttgatattattcataagatcccagggacatattacttcaactatcacgttgggtgtacacacatggtgtacacattatgtgtgaacaccttctgtgatattattcataatatccttggaaaatgggatgcctaatgtcacagtgagtgtacacactgtgatattattagtaatatcctaggggaatattactcctaaacaaaggcgtgtgtaccccctatgatattattcgtaatactctagggagatgttactcctaatgtaatatcacaggggtgtacaccctgtgatattattcacagtatatgagagggatattagcactgaagtcacaatgtgtgtacaccttctgatattattcataatatcctagggggacgttactcctattgtcacgggttgtgttcgctacgatagtattcgtagtctcctagacggatgtgacacctaatgtcacaggttgtgtacatcttgttatattattcgtgatatcctaaaaagacattactcctcatgtcacaggggctgtataccctatgacattattcgtaatatcctagcgagatgttacttttaatgtcacagagggtgtacgccttttgaaaatattcatcacagtttcgtgggatgttactcgtaatgtcacacggggtgcacaccgaaggatattacttgaaatattctatagaaatgttactcataaatcacaggtgttctacaccctgtaatgttatgggtcatattctaggggaatgtgacataaattcatgtcacccggcgtgtacaccttgtgatattattcgtgatgtcccagcgggatgttactactaatgtcacaatacgtgtacaccctctgatattattcattatatcctcacgggttattcctcctatgtcacacggggtgtactccctgtgatattattcggaatatcttagggggattttacttttaatgtcacaaagtgtgtacacattgtgatattactcgtgatgttctagaaagatattactcctaatgtcacagggggtgtacaccctgtgatattacacaggctaaccccctggggcattattcgtaatactttagtgggatgatacacctgaagtcacaggaggtgtacgccctgtgatattattcggaatattccagggggatgttactcctaaagtcacaggtgtgtataccctgtgatagtattcacaatatactagcgggatattaccactaatgtcaccgtgtgtgtacacctcctgatattattggtagtatcctgggaggttgttactcctaacgtcacaggggtgtacaccctgtgttattattagtactattctagggggattttacttttaaaaatcacagggggtgtcaagcctgggatcttattcgtaatatcctaggaaggtgttactcgtaatgtcacatggggtgtacaaccttggatattatttcgaatatcctaaagggatgttatcttaatgtcatagggtgtgtacaccccttgatattattcgtaatatcctaaggagatattactttaaaaatcacagtgggtgtgcacacatggtgtacaccctgtgatattattcacaatatctgagggaggtataacttttaatatcacagtgggtgtacacactgtgatattattcatcatattgtagaagtatattattcctattgtcacaggggtttaacatcctgtgaaattatttctagtcatccagggggatgattaccctaaagtcgcagggtgtgtacaccctgtgatattattcgtaatattctagggggatgttactcctaatgtcgcaaaggtgtgcatgctgtgatattattcagaatctattagctggatattgttactaatgtcacaatgcgtgtacaccttgtgatattattggtaatatcctaaggggatgttactcctattgtcacagggggcgtgctttcggtgctatgattcgtagtatcccagagggatgttactcctaccatacaaattgtgtgcactttgttatattattcgtaatatcctagagtgatgttactcctcatgtcatggggctgtacatcctgtgatgttattcttcacattctagaaatatgttaattcctaatatcacagaaggtgtacgatctgtgaagctattcataatcgtttcgggggatgttactcccaatgtcacacgtggtgtacaaaccgtgatattattcgtaaagtttttttggatatgttactcctaatatcacaggggctgtgcaccctgtcatattattcgtaatatcctaaagaaatgttaccactagtgtcacaggcggtgtacaccttgtggtattattcccaatattgtagggtgatgttactcctaatgtcacggaaggtgttcacactctgataatattcgtaataccctaaagtgatgttactaaggatgtcacaacgcaggtacacaaactgctattgtttcttagatcctcgggcgatgtgacttctaatgtcacagggggtgtacattttgcgatattatttgtaatattttagaaagatgttattcctaatgtcacagagggtgtacaccctgtgaagttattcatgatagttttggggtccgctactcctaatgtctcccgtggtgtacaaacagtgatatgattcctaatattttatggaaatgttactcctaatatcacaggggctgtacaccttgtaatattattcataatatcctaaggaaatgttacctctaatgtcacagggggtgtacaccgtgtgatatggttcccaatattgtagggggatgttactcctaatatcacagggggtattcacattgtggtaatattcgtaatatcctaaatggatgttactgctaatgtcacaacacgtgtgcatcctctgtatttgttccttatatccttgggtgaggttactcctactgtcacacagggtgtactccctgtgatattattcataatatcctaggtggatgttactcctcgtgtcacaggggccatgtgtcttgtgatgttattcacaatatcctagaaagatgttactcctcaggtcacaggggatgtacaccctgtgatattattcgtactatcctaggggatgttactccaaatgtcacagaaggtgtacactctgtgatattactcgtaatgtgtcagggaaatgtactcctaacgccacagggcatgtgcaccatgtgtgcccagcccctgtgatgttgtttgtaatattctggagggatattaatcctaatattccatatggtgttaaccatgtgtgaacacctttgtggtattattcctaacatactagaagggtgtaactcttaacatcacatcgggtatacaccatgtgtgtacacattctgtgatattattcataacatcgtagggagatgctactcttaattttacaaggtgtgtacattatatgtgtactccccctctgatgttgttcataatattctaggggaatgttgctgctaatgtcacagggagagtacaccatgtgtatgcaaccctggtaatattatttctaaaatcttggggtgatgttgctcctaatgtcacctggagtgtccaccatgtgtgtacaccttctgtgatattattcgcaaatcacagaagaagattacgcctaatgtaacagggtgtgcacaccgtgtgcgtcaaccgcctttggtattattcataacatactagggggttgtgacttttaatgtcacaaagggtgtacaaaatgtcacagggtgggtatgccttatgatattattcccaatatccagaaggatgttactcctaaggtcacagggggtgtacacccttcgatactatttgtagtcttatacggagatattactgtaaatctcacagtgggtgtacactatgtacactaaatgtacactcactgtgatattatttgtaatatctcagagatattacagagttattgctctctgtgttatattagagagttatatctctctaagacagtacaaataataccacagtgggtatacctcgtgtgtgtacaacctgtgatattatttgtaatatccatgttaaacattacatctattatcacagagagtgtactccctttgatatgtctcatactatcagagttagatattgcttctaatatcacagtgggtgtacaccttatatcctagggagatatctctccgaatatcacagtgtgtgtacaccttgtgatattattcataatgtcttagaaggatttactcctaatatggcagagggtgtacacccagtgatattcttcgtaatatcctagggagatgttactcctaatgtcacacggggtgtacacccatgatattatttgtaatattctagggggatgttacttgaaaagtcacagggggcgtacaccctgtgatgtcgttcataacatcctaagaagatgttacccttaatgtcacatggggtgtacaccctgtgatattactcggaatatcttatggggatgctactcctaatgtcacaggctgtgtacactctgtgatattatttggaatatccacagagatgttacctttgatgtcacagacggggtccatgctttgatattgtttttcatatcttagggagatattacttcaaatatcacagtgggtgcacccactgtgattgtattcgcaataccctagggagatataacttttaatatcacagtaggtgtacacactatttatgtacacctactgtgatactatacctaatatcctaaaaattaataggactcctaatatcacagttggtgtacacactgcgatattattcataatattccagcgggatgtcactcctcaggtcacagggggttaataccctgggacagtattcgtcataatccagggcggtggtactcctaaagtcacaggatgtgtaccctctgtgatattattcatcctattctagggggatgttacccctaatgtcatagggatgtataccctgtgatattattcatagtataccagagggatattagtactaaagtcacaatgcatgtacaccttgtgatatgattcgtaatatcctaatgtcacagggggtgtgttccctgtgatattattcctaaaatcctagaagaacattgctcctaatgtcacagggtgtgtacaccttgtcacatcattcataatgtcctaaaactacgttattcctcaggtcacagggggtgttcaccctgtgatattattcatcatagttttctgggatgtttctcctaatgtcacacggggtgtacacagagtcacacagtgatatgacttgtgatattctatagaaatattactcataaatcacaggggctgtacctcctgtgatattattcgtaatattctaggggaatgttactactattgtcatagggggtgtataccctgtgatatgactcatcgtattccagcgggatgttactactaatgtcacagtgcgtgtacaccctgtgatattatttgtaatatcctgaagagttgttactactaaggtcacaatgcacttacaaactctgatgttattcgttatatccttgggggatgttactcctaatgtcacacggcgtgtactccctgtcatattattcataatatccaagggggatgttatttttaatgtcaccgggggtgtatatcatgtgtattcaatgcctgtgatactattcctaatattctaggggcatgcttttcctaatgtcacatggggtgtacaccatgtgtgtacacctgctgtgatattattcataatatcctaggggaatgtcactcctgatgacacaggccgtgtacaccatgtgtgtaccccgccctggttattattcatatcccccaggatatctagcgggatgtttcttttaatgtcacaaagagtgtacaaaatgtcacagaagttgtacaccttgtgacgttatctgtaataccctagaaggatgttactcctaatatgtcacaggggtgtacaccctttgatatgatttgtaatctcatagagagatatgacttcaaatatcacagtggaggtacgcacatagtgataccctgtgatattattaataatatcctagggagatacaactcctgatacaggtgatggttgtggagcccacaggactgcaacctcacactgcagggctggaggcacagactgagtatttactattctatggcccggggggctcaaggcacagagctcctcattagccagagtcgcccaagttccccttgctctcaggatttcctcatcatcatgcaagaagaagaagagaaaagtgagtgtccatagaagctctggggctcttcctctcatcaggagagagcttgtgtgtattattcgcttctttcttttcttttacaagatccaagtgctttaattttcatcttttattatgggaagatataccacgtataaatattaaaaatcacaaatatagattatttcatatagaatggccagtataaacatttacaatttccactagttttcagtttacagtttaatcacattaggtacattcacattgtttagcaaccatcaccgccatcatctccagaacagttttatccttgaaaatggaaattgcacccattaaccaaactccattccactctctctcgcccacccctgggggccaccattctgttttgcaactctgtaagtttaactactgtagacacgtgatataagtggaatcataccgtgtttaatttttttggtttgtttgttatggagacagagtctttctctgtcgcccaggctggagtgcagtggcatggtctcagctgactgcaacctccacatcgtgggttcacgcgattcttgtgtctcagtctcccgagtagctgggattacaggcgtgcgccaccacgcccagctaatcgttgtatttttaatagagacgagctttcaccatattggccaggctggtctcaaactcctgaccttaagtgatccgcctgcctcagcctcccaaagtgctggggttacaggtgcgatccactgagcctggtcgtgtttatccttttgggatttatttatttcactgatgagaatgtcttcaaggttcacccgtgttacagcctgtgtcagaagtgcctgtctggttgtttgcgtgtttttttttttttttttttggttttgttttgttttgtgattacatggagtctcactctgtcgcacaggctggagtgcagtgacacaatctgggctcactgcaacctccgcctcccaggttccagcaattcttgtgcctcagcctcaccagtagctgggactataggcacacaccaccacgctcgtctaatgttctgcattttcagcagagacaggatttcaccaagtccatggccaggctggtcttgaattcctgacctcaggtgatccgcccacctcggtcttccaagatgctgggattacaggcatgagccaccgcaccggccagaagtgcctgcctttttaaggctgaatagtcttccatcgcatgaatgaactgcagtgtgctttttcattcatctgtccacgaacccttgggttgcttccacatgttggctgttgtgaataatgctgctatgaatttgggtgtacaaatctctcttccactcctggcttctaattctttttggagggtacccacaagtgcaactgcgggaacatctggtaatcctgtttctactttttccagtacacgccattctattttccctgttccttcacggttttacattccctccaatcagtttcgagcattcctacttccctctagtttcaccaatgctcgtttgtttatcacatccatccaaatgtgtggtatcacattcttggttggatttgcgcttccctatgatgagtgattttgaacatcattttagatgcttattggccattgctgtatcttctttagggacatgtctactcgagtcttctgaccattgttaatgggatgctttgggtttcttgttgttcagttctagctgttctttgtatatgatgcatatcagcctcttttcagagatatgatttgcaaatctttttcctaatccatgggttatcttttcactcagttcacagtgtttgctgatgtacaaaagtgtctgtcatttagatgtcatccaagggatctaattttcttttgttgcctatgcttttggtgtcatatcccagaaagcattgcccaatctgatgtcatgaaagtgtggccaatgttttcttttaggcatattatactttcagcagttggggttaggtctttgatccagtttgtgttcatttttgcacctggtgtgacatagagtccaccttcattcttctgcatgtggaaatcaagtttctccaacaccatttcttgaaaaggctgcttttccaccaatggactttcttagcactcatgtgaaaaatcatttgaacatataggtgagaagttatttctgggctcaaaaacaaacaacagacaacagataaggatgcagcatgggccgggcgccgttgctcacgcctgtaatccaagcactttgggaggccgaggcgggcggatcacctgaggtcaggagttcaagaccagcctgacagacaggaagaaacccccatctctactacaaacacaacattagctgggcatgctggggcatgcctgtaatcccagctgcttgggagatggaggcaggagaatcgcttgaacccaggaggcagaggttgcggtgagccaagattgcaccattacactccagcctgggcaacaagagtgaaactctgtctgaaaacaaaaaaccaaaaacaaaaaatccagcatgatttcgagagcagaaagagaatagctgaaaaaccagcataatgagaaagttaggaagcttcttaccaaagcatctggaaatatgccagaaattcttgtgaactaaaattttcatactgtactatcaaacactagaactcacttattccatctttctgtattttgggacccaattatccacttctcttcattccccatcccaccccttttcttcctagcgtctgctaaccacctttatactttccaccttcctgagattccttttgtgtgtaggtgtgtgatggagtctctttctgttgcccaggttggagtatacaggcaaaatccgggctcactgcaacctccgcctcccgagttcaagcgcttcttgggcctcagccctccgagtagctgagactacaggcacgtgtcaccacacccggctaattgtttgtgttttcagtagagacgggatttcaccatgttggccaggcgggtctcgaactctgggcctcaagtgatccatgtgactcggcctcccacggtgctgggattacaggcctgagccaccaaacctggccaagattttctgttttgttcctacatagaagtgaggatatgaaatatttgtcattctgtgcctggcttatttcatttaatatacagacctgcaatcgcatccattttgtctgcaatgaagaggattttgtttattcctttttaggctgaataatacttcattgggtgtgtataccacagtttctcaattgaaacaaatttctaaagagcaaatatttttaaaatgtctcagaatgtgaaacttcagggatactgtgcccattttattcttttctatttcacatcttatgtatatgcaagtgtataacaaaacagcaatcaaagtgtgtataaatctataatttcaacaaatgtaaaatgaaaatgctaagtggtggctgggcgcggtggctcatgcctgtaatcccagaacactgggaggtggaaccaggcggatcacctgaggtcgggagttcaagaccagcctgaccaatatggagaaccactctgtgtactaaaaatacaaaaaaaaaaaaaaaaaaattagccgggcatggtagcgtatgcgtgtaatcccagctacttggaaggctgagacaggataatctcttgaatacgggaggcagaggttgcagtgagccgagatcgtgccattgcactccagcctgggcaacaagagtgaaactctgtctcaaaaagaaaaaaaaaagaaaaaagaaaaaaatagaaaatgctaaatggtaagaaacaacagcataataaacatttgtatggtgttgatggacaatgcatttgaagataatatttgaagaaatcatattacaattaacttctgttcttactaattggagcttgatgcctctaaaaacttcgtcattgcaaccacctctggtgcttaaaaaaaaaaaaaaaaaaaatccacatactcacacaggtgcagggaaatcagaatctcaggtaatggcacccaggcctcagcatttgtaagctccccaggtgatttgactcaaagccaagattgaggacgggtgacatggatctctacacataacctgcctaaatagattctctagaagcagtttataaagaaattccacatgaactctggaagaggatatgaatttgatgtacagtatgtcctcacttaacatctttgaaagtctcttggaaacttcaccttgaagcaaaattaggtatagtgaaaccacttattcctcaccaacattataactacacaactttgaacgcaccaatggtgttggaggacctgctgtacattgtttccataaaggcaattttcagggaattccaaaatgaagtgaggacttcacgtatataaaaagatggttgtgattccacctggatgacagggttattgctcagaaactaaaggaggccacctaggtatagaggattcagtcatgaggtttctgctaaacaaaggatcccagaatcctcacccattccagtgaaaggtataacgaagaaaacaatattcacataggaaatgcagaaaggaataaaagccatcaagccacaaaaataatgtgactaaggggcaggatttgcagatgtagggatttaatgtggttgccctttctcacccacacaagaaaaaggatggaacagatcatgagattcgactgttctgctgagcagcctcctcagggtgctttgaatgtccctgtttctcaggctgtagatgaaagggttcagcatgggggtgaccacagtgtacatcactgacaccaccacaccattcctggggggtggtgacacagctgaagtcaggtacacgccaatgcctgctccataaaataagcaaacaagtgccaggtgagagccacaggtggagaaggctttatatttcccatctgatgttgaaatccttagaatggagggaacaattttacagtaagacaaaaggatccctgaaatgggaagaaaaccaaacatagtactatcgaaatatatgaatatgctattgatgatgctgtcagaacaggcaagcttgagaagttgagatggctcacagacaaaattagagatttccacattcttgaagaaggtgaattgtaacacaatctaactgtgcagctgggaatccaacaggctaaggaaaaaggacaccaaaactaagaagacacggaggtgaggattcacgatgactgggtagtgtagagggcgacagatggctacaaagcagtcataggccatcacagtcagaagcatgtcttctatacatgcaaaaaggaccaaaaaagacatccgtgtcaggcagcccacataagagatgactctgctatgcgactgcatgtccacaattatcttgggaaccgtggccgaggtgaaaccgatgtcagcccagcacaggttggagaggaagaagtacatgggggtgtggaggtgggagtcagagctgacagccaggatgctgagcaggttcctcagcaccgtgaccagacacatggacagggacagcccagcgaggacgggctgcagttctggatcctctgagagtcccatgaggaggaattctcagacatctgtgagattccgtggctgtgacttggacaccctgggaagaaaagaggattggaaaaataaaagataaaaaccagcccttaatgctgtgtgtatattttggatgcaaacaattcacaaggaacattttcacacttgaggaccatacaccgtcagcaatatttctcagttgtgacaaacccaaaaatctcagaattattacatgatttacttttttcttttcaactccttctgtacatactactttagagaaaatccactgaagaatgttagaagaccaaaatgtcatatataacaaatccgtgatctcagtaaaatatggcctactcttttcagaaaaaataaaatgcagtgaagatgctcttctctctttaagaaaaagatctcagcctaattgaaagaaattaagaagcagcgaaatacactctattttattttgacaccgtgctacaaattcctttgatgtggaatatgtaaaaggatgatacaagagctaggaccgcattatgtaaaaatgaaattgaaccttagagttcttaatcggaagaccttttaacatgccagttacttttcatatttattatcatccttaggttttctgacatcatttcttcataaagtacatgcacactcaaatatgggagctgtgtttccaaatgaattgaatatataactcttggccgagcaccatggctcacacctgtaatcccagcactttgggcggccgaggccgacgaatcacctgaggtcaggagttccagaccagcctggccaacgtggtgaaaccccgtctctagtgaaaataaaaaaaaattagccgggcgtggtggcggggtaaccctagctactcgggaggctgaagcaggagaatcccttagagcctggaaggcagagattggacaccctgtggtattattttggatatcctagggagatattgctcctgacatcagagtgggcgtacaccctgtgatattgtttgtaatatcctagaaagatgttgctcctaatatcacagtggctgcacaccctgtgatattaattgtaatgtcctacagagatatcactcttaataatacagtgggtgtacaccctgtgatatttttcataatatattaaggagatatgactcctgatatcacagtgagcgtacaccctgtttgtacaccctgtgatatgatttgtaacaacttagaaaaatattacagctaatatcaaagtgggtgtacaccctgtgatgttctttgttatctactcggtagatattactcctaatatcacagtgagtgtacaacctgtgatattatttgtaatcacctagggagatatgattcctaatattacagtgggtgtacactctgcgatgttatttgtaatgtcgtaggaagatattactcctaatatcaaagtgggtgtacaccatgtgtgtacactctgtgatataattcgtaatatcccagagagatatttctcctaatatcacagtgggtgtacactctgtgatattattcgtactatcctagagagatattgctcccagtatcacagtgggtgtacaccctgtgatattattcatcatatcctagagacacattacctctaatatcacagtttctgtacaccctgtggtattattcgtaatatcccagggagatattattcctaacatcacagtgtgtgtacatcatgggtggacgccctgtgatgtttttcatcatatcctagggggatattacccttaatgtcacagtgggtgtacaccacgtgtgtacacagtgagatgttactggcaatatcctagggagaaattatgcctaaagttacactgggtgtacaccgtgtgtttatgttctctgatgctattcataatatcttagaaagttattattcctagtgccacagtgggtgtataccgtgtgtgtacactctgtgatgttattggtattatcctagggagatggttctcataacatcactgtgggtgtacatcatgtctgtattccctgtggtgttattggttatgtcctgggttgatattactcctaatatcaccatgggtgcacaccatgggtgtacattctgtgatgttattcgtaatatcctagggagatatcactccctgtgtcatagtgggtgtacggccttgtgatattattggtagtatccttgggacgtattactcctgttatcacagtgggtgtgcaccctgtgatggtatttgtcatatcctagggagatattactgtataccttgtgatattatttgtgacattttagggagctatttctcctaaagtccgagtgggtgtacaccctctaatattcttgctaatatcacagtgggtgtacacgatgagtgatattttttctaatatccagcggggaagaggatgatgttgcttccaatatcacagaaggtgtacacccccctgtgatactgtgctgaatatccaggggaggagaggatgacattattcccaatatcactgggggtgtaccaactcccgccgggatattgttcttaatttctggaggtggagagaatgatgttactcccaatattacagggggtgtacaccacccctgtttgtaaacaccccccatgatattgttccaaatggcctgtgaaggagtaaatatgactcccaatatcgcggggggtgttcagccctgaggatattgttttctaacatccagggaaggagagtatgctattactcccaatatcgcaggggttgtacacccttttgtgtttctgtgcccaatatccaggaaaatagaggatgatattactcccaatatcgaagtaattgtacagcacccctgtgatattcttcctaatatccagaaaggaaaagaatgatgtcactcccaacagcataggaaatgtatacccgctctgcgatatctttcccaatatccaggtggggagaggatcatattacttccaatgtcacagggtgtgtacaccccctctgtgatctcgttgctaacatccaggtttggggaggatgacattactcccaatgtcacagtgggagtacaccccccaccgtgaccttgttagtcatttcctgggtggagaggatgatattactcccaatatcgcagggggtgtacacacccctgggaaaatcttcctcatatccagagggagagaggatgatattactcccagtaccgcagggggtttacacagccctgtgatactcttcctaatatccacagggagagaggatgatatcactcccaatatcgcagggggtgtacacaaccctgtgatattgttcctaatatccagagcgaaagaggatgatatgactctcaatatcgcagagggtgtacacccctcctgtcctattgttctgaataccctgggagggagaggataagcttatgttgaatatcgcagggaatgtacaccctccccctctgatacccttcctaatgtccaggggaagagaggaaaattttactcccaatatcgcagaggcagtacaccccacctgtgatgttgttcccaatatgcaagggggggagaggatgatactactcccaatatcgcagggctgttcacatccccagtgacatttttcctaatatctaggggagagacagttctatgacagcaaaggtctcagggtctgtacatcccttcctgatattgttcctaatatccagggggggaagaggatgataccaaatatgaaagggggtgtacaccccccacccctatgatattgttcttaatattcgtgaggggagatgatgatattactccaaatatcgcaggagttgctgacacttccctgtgatattgtttctgatatccgggggggagaaaatcatattacttccaatattgcaggtggtgtataccccacctgaaatatggcaccgaatatccaaagagggagaggatggtattaataccaatatcgaagtgtgtgtacatgccccttgtgatatggtttttaatatccagtgggcgggaggatattagtccccacatcctagagggtgtacactacccctgtgatattgtccctaacttccagaggggagaggatgacatcactcccaatatctcagaagttgtacatcccccgtgatattgttcatcatatccagggaggcacaggatgacattccattgaatttcgcgacaggcgtacacgtacagtgtgatattgttcctaatatccaagaagggagaggatgatattactcccaataaaacagtgggtgtacattgaccctgtgttattgtctctaatatccggggccgggggaggtggggagaggataacattccctcaaatttagcaggtagtttgatgccccttgtggtgttgttttaaatatccagcggggaagacaatagtactatttttgaaagtccgattcatccattccacctttccggaactctgaggccgggaggtggcaggcagtttccgtgtgatccccaatacctttgccgtcttctgtaccaaggccgccaaaaacgcaggtccgttatctcagccgatccgtaagggcagtcgaaatctaggaatcagatttcgaagaagcacaggggttatcacgagctttctcagttcgtgttggataggcctccacccacccagagtaggtacacccaagaactagtaaatacttgttacctccccactttggcatccctgtgaagtctacctggagatcttcaaagggggctgctccataagcttgtatgccgggcggaacggctgcaccttgcctcgcatcatgctgtcggcaggtaacacaccgctgcctcaccgttttggcaagggctgacaaatgtgagatgtagaaacactggcctaacaacttttccagtgactcctgacctcgatgggtggtttcttgtccaactacagctcctagcaactgtggcgcagctactctcccatctggtaaccgaatccatccttcctccatcacttgtccttccctctacctggagaaagtccttttcttctttagaagaagtaggtccaagatcaggtgcttgagggagcactgatgcccgaaagggggcagatgctgcttttcgagcctctgagtcagcgcgggaattccccaaacccagcaaggtggaagctcgctggtgtcctctgcaatgcataactgccaccttgtggggtttccactctgcttctaatcattgcgagatttcttgttgatattttctgtcttttcccccagagttaaataggcctttttctttctatcacgctccatgcacttgaagggttaaaaagacataccgggaatcagtgtaaatgttgacagtctcaccctcactgagttctaacgccccaaatgaaagcaatgagttcagctttatgggctgcggtggcctggggcaacgacctggtttcaacaacagtgtccagggttacccctgcacaccctgcacctctctctccttgggggttgaagaagctgctcccatccacgtatagttcccagtctactgatgcccaaggctggtcccggaggtcaggtctgctagagtcaattgagtccaacacttctacacaatcaggctcgacagggctctctgataccgggagcaaggtggcggggtgtagggtgttacaaacttcaatggttatatggggattttcacagagcaaagtttggtactgggtgagtgtggcattcgttagccaatggtgtcctttagtattcattaaagtcaccacagcacagggggcctttatgttcaggttttgcccaagagtcagcttatttgcttcttgtactagcagggcagttgctgccaaggccctcaaacaggggggccatcctttagaaaccctgtctagttgtttagagacgtaggccaccggcctcagccagggccccacagtttgggttaaaagtccagctgccatcttttctctctctgacgcatacaatggaaaaggctttgtcagatcgggtagccccagggctggggctgccagaagtttttactttaactcatgaaagacttgctgttgttgggatcccccttgcaaaggttcccggtccccgccccctttgtgatctcatagaaaggcttggctaatactgcaaagtttggaatccacagtccacaaaaccccacagctcctaagaattctctcacctgccttctgcccttaggctctgctagattgcaaatgacctgctttctttctgatcctgggctgcgttcccacccctgtcagatagtaaatcccaagtaaggtacctgctttcggcagctctgagctttcttcttggacacctaaaacccacagtcctccaggtgggtcctaaggatcttaggatctgcgatggggttcctaagccagggggggaagaggggctggctctcagtccccaccctgcggtgggtgcctccccaccctgtgctgggcgtcctaagagccagagggggaagaggggctcgctctcactccccgcctcccagggggtgcctccccccgctgcgatgggggtcctaagagccggggggaagaggggctgactttcagtccccatcgcacggggggtgcctcaccctcctgcgatgggggtcccaagagccgggggaaaagagtggctggctctcagtccccgcttcgttgggggtgcctcccgccccccatgggggtccgaagagccaggggggaagacggactggctctcagtccccgcctcgtgggggctgcctcccccctacgacgggggtcctaagagccagtgggggaagaggggctggctctcagtcccgggctcgccgggggtgcctccccatcctgcgatgggtgtcctcagagccaggggaaaaaaggggctggctctcagtccccgagccgcggggggtgcctccacccccgcgatggtggtccaaagatccagggagggaagaggggctggctgtcagtccctgcctcacggggttcctcccaccctgcgatgggggtcctgagagccagggggggaagaggggctggctctcattccccgccttgcatggggtgactcccccccctgctatggaagtcctaagaggcagggggggaagaggggctggctctcagaacccgcctcgcgggggtgcctctcccccctgctatggaagtcctaagagccagcgggggaagagggggtggctctcagtccccgccacttggaggttgcctcccccactgcgatgggggtcctaagagccagggagggaagagggggagaggatgataataattccagcatcacaggcagtgttcacccagcctgtcaaattgttattaatatcctgaaagggagaggatgatattactccccataatagacagatacggctccccataatagagaacgaggtgtacacccaccctgcaatattctttccaatattcagaggccgagaggttgatattactccaaatatcgcagtaagtatacacccctgtgtgagatgctccttcataatataccaaggcggagggggtgatatgacttcatgtatggcagaaagtggaaacccccagggatgttgtacccacgatcctggagggaagaagatgatattactttcaatatgacagaaggtggacacgccctcactgatattgtttctaatttcagcgtgggagaggaggatataacacacgatatcgcagggagtagaaacacccctgtgatactgttcttaatattcagggaggaagaggatgatattactcccagtacagacaggtgtataccctctgtacaccgagggtgtacacccatctgtgaaacagttcataatctccagagagcgagaggatatgactcacaatatggtaaacagtctgtgagtccaccttggatcctaagagccagagagggaagaggggctggctttcagtcaccacagcatggggggcctttatgttcaggttttgcccaggagtcagcttctttgcttcttgtactagcagggcagttgctgccaaggccctcaaacggggggccatcctttagaaaccctgtctagttgtttagagacgtaggccaccggcctcggccagggtcccacagtttgggttaaaagtccagctgccatcttttctctctctgatgcatacaacggaaaaggctttgtcagatcgggtagccccagggctggggctgctggaagtttttcccttaactcatgaaagacttgctgttgttgggatcccccttgcaaaggttcccggtccccgccccctttgtgacctcatacaaaggcttggctaatactgcaaagtttgggatccacagtctacaaaaccccacagctcttaagaattctctcacctgccttcttcccttaggctccgatagattgcaaatgacctgctttctttctgatcctgggctgcgttcagacccctgtgggatagtaaatcccaagtaaggtacttgccttccgcagatctgagctttcttcttagacacctaatacccacagtcctccaggtgggtcctaaggatcttagaatccgcgatgggggtcctaagccagggggggaagaggcactggctctcattccccgcctcaccgggggtgcctccacccccttcgatgggggtcccaagagccagggggggaagagaggctggctctcagttcctgcctcgctgagggtgcctcccctacctgcgatgagggtcccaaagccagggggggaataggggctggttctcagtccccgcctcccggggggtgcctccccccgctgtgatgggggtcctaagagccagggggggaagaggggctggctctcagtcccctcctcctgggggatgcctcccgccaatgcgatgggggtcggaagagcaaggggcgggaagaggggctggctcttagtccccgcctcatggggggtggctccccccctccgatgggggtcctaaaagccagggggaaaattggctggctctcagtccccgctcacggagggtgccatcccccctgcgatgggggtcccaagagccagtgtgggggaacagcggctgcctctcagtccccgcctcgcgggggtgcctcccccccgcaatttgggtcctaagagccaggggggaaagaggtgcttgctctcagtccccgcctcgcggggggtgcttcctcccctgcgtttggtgtcctaagagccagggggggaagaggggctggctctcagtccccacctcgcggggggtgactctccgccctgcgatgggcgtcccaagagccaggaggggaagagtggctggctctcagtccccgcctggcggggggtgcctccctcccttgcaatggggatcctaagagccaggctgggggaagagggattggttctcagtccccgcctcgtggggagtgccgcctcctctccctgcgatggggtcctaagtggcagggagggaagaggggctggctctctttccccgcctcgcgtgtggtgcctcccccccccacgttgggggtcctaagacccaggaggggaagagtggctggctctcaatccccgcctcgcggggggtgcctccccccactgcgatgggggtcccaaaagccgggggggaagaagggctggctctcagtccctgcctcgcggggggtgttcccccctctgtgattggggtcctaagagccatggagggaagaggggctggctctcagtccccgcctcgcggggggtgcctcacccccttgcaatgggggtcctaagagccagggggggatagaggcggagaggataataattccagcatcgcaggctgttcacccagcctgtgaatttgttattaatatcctgaaagggagaggatgatattactccccataatagacagatatgactccccataatagagcacgaggtgtacacccaccctgtgatattcttcccaatattcaaaggccgagaggttgatattactccaaatatcaccgtaagtatacaccccggtgtgagatgctccttcataatattccaaggcggagggggtgatatgacttcatgtatggcagaaagtggaaacccccagggatgttgttcccacgatcctggagggaagaagatgatattactttcaatatgacagaaggtggacacgccctcactgatattgtttctaattgcaacgtgggagaggaggatatgacacgcgatatcgcagggagtagaaaaacccctgttatactgttcttaatattcagggaggaagaggatgatattactcccagtacagacgggtgtacatccgtctgtgaaacagttcataatctccagagggggagatgatattactcacaatatggtaaacaggctgtgagtccaccgcagatcctgagagctggtggtggagtgggtgtgtggggctggctctcagtcaccacagcatggggggcctttatgttcaggttttgcccaagagtcagcttatttgcttcttgtactagcagggcagttgctgccaaggccctaaaacaggggggcaatcctttagaaaccctgtctagttgtttagagacgtaggccaccggcctcagccagggccccacagtttgggttaaaagtccagctgccatcttttctctctctgatgcatacaatggaaaaggctgtgtcagatcgggtagccccagggctggggctgccagaagtttttcctttaactcatgaaagacttgctgttgttgggatccccattccaaaggttcctggtccccgccccctttgtgacctcatagaaaggcttggctaatactgcaaagtttgggatccacagtctagaaaaccccacagctcctaagaattctctcacctgccttctgcccttaggctccgatagattgcaaatgacctgctttctttctgatcccgggctgctgagttcggacccctgttggatagtaaatcccaagtaaggtacctgccttcggcagctctgagatttcttcttggacacctaatacccacagtcctccaggtgggtccaaaggatcttaggatccgcgatgggcgtcctgagcaagggggggaagaggggctggctctcagtccctgcctcgcggggggtatctctccccgctgcgatgggggtcctaagagccacagggggaagaggggctggctcgcagtccccgcctcctggggggttcctccccccaccgcgatggaggtctcaagagccagggggggaagaggtactggctctcagtccccgcctcacagggggatgccttccccccgtactatgggggtcctaagagccaggggggaaagaggggctggctctctgtccccgcctcacgggggatgcctcctcccctgcgatgggggtcctaagggccaggtggggaagaggggctggctctcagtccccgcctcactgggggtgcctccccccactgcgatgaggtcctgagatccaggtgggaagagggggagagaatgatagtaattccagcatcgcaggctgtgttcacccagcctgtgaaattgttattaatatcctgaaagggagaggatgatattactccccataataggcagatatgactccccataatagagcacgatgtgtacacccacgctgtgatattcttcctaatattcagaggccgagaggttgatattactcccaatatggcagtaagtattcacccccgtgtgagatggtccttaataatattccaaggcagagggggtgatatgactacatgtatggcagaaagtggaaaccccccagggatatttttcccacgatcctggagggaagaagatgatattactttcaatatgacagaaggtggactcgcccccactgatattgtttctaattgcaacgtgggagaggaggatatgacacgcgatatcgcagggagtagaaacacccttgtgatactgttcttaatattcagggaggaagaggatgatattactcccagtacagacgggtgtacaccctctgtacaccgagtgtgtacacccgtctgtgaaacagttcataatctccagagggggagatgatattactcacaatatggtaaacaggctgtgagtccaccgtggatcctaagagccaggcggggaagaggggctggctctcagtcaccacagcatggggggcctttatgttcaggttttgcccaagagtcagcttatttgcttctcgtactagcagggcagttgctgccaaggccctcaaacggggggccatcctttagaaaccccgtctagttgtttagagaggtaggccactggcctcagctagggccccacagtttgggttaaaagtccagctgccatcttttctctctgtgacgcatacaatggaaaaggctttgtcagatccggtagccccagggctggggctgccagaagtttttcctttaactgatgaaagacttgctgttgttgggatccccattccaaaggttcccggtcccagccccctttgtgacctcatgcaaaggcttggctagtactgcaaagtttgggatccacagtctacaaaaccccacagctcctaagaagtctctcgcctgacttctgctcttagactccgctagattgcaaatgacctgcttctttctgatcctgggctgcgttccgacccctgtgggatagtaaatcacaagtaaggtacctgctgtcggcagatctgagctttcttcttggacgccttatacccacagtcctccaggtgctggtgtagggcatctgttcccttgggacacccgactgcaatggggtgtcccagcagaaggtcatcaacctactggagcaacacgcagcctaggtctctggtgggaaacttctgatggtctcgagccaacgccttcccgaagatggtgggggagttcttgaacccttggggaagcccggtccaagtgtactgagtagtgacacctgactccggatcttcccactgaaaggcaaacagcttctgcctctcaggggataatctgataggaaagaaagcgtctttcaggtccaagcaggtgaaccagctgtcctcagctggcagcaaacccaacaatgtggacgggttaggtactgttggatgtaaagtcagtgtagcttgattaagcaagcacaaatcctgtactggccggtagtccttggtccgtggcttgggaacaagcaggaggggagtgttccatggcgactgacaaggaacaataattccaaaagttgttaggtgcttgagacggacctggataccttgaagagcttctctggggacccggtcctgtttttgcctaaccggctgggccgcagtcttaactggccaatcccagagggttgtcttccgcccggacccttggccaccgcttggccagagcttgtcttctctcttggcccagctcagttcagaaaagtctccattcctcctctcgggggaccgtaagggtcataatgactcctgttctgggtaactttagcagcaaagagccgtgctctgtcaaagaggtagtggctctcagcttgctgagcaagtcccttcccaaaaagggcaagggacagtcaggcatgtaccaaaactgatgaatgacttgatgtcctcctacagtacaagtccgaggcaagcagaaagcttgctttgctgaaacccccatggctccggtgatgtcaagagcctttttggataagggggtgaccggggcggttactagcgaatgttcagcaccgctgtctacaagaaaatcaatgtctctaccccgaccatcattctgaccagggggtctttggggacacttgagcccggtctcccctcagtccaataacccttctgccaggttgagccgggccccttcctccttgtccggggcctcctgctctgagtcaccttgttttcttttgagctgagggcatttgttcttccactgtcctatttctttccaataagcacactggttacgctgcaaaccctgacagccaagctgagtttctttcccagggccccccttcccttgcttctttggggggacccctctgattgctgcagctaacaaacaggtcagcatttcgccaggcctgacgttcattctctttgcgcttttcctcgcggcttactgcatccctgtttacaaacacctgcttagctatttctcatcattgtgatgtattcatccctgcaagcccagcctgcttctgcagttttcttctaacgtgttccgcgctttgacggactaaagccatgtgaatcatgtgctgattttcagggttatcgggatcaaggggagtatacataccttaggcctcacacagtctctggtagaattgtgctggacttcttttccctgaatgacctcagagaccttgttaacgtttgtggccttttgagctcccgtctttaatgcttccaagagagcttcccggtctcagtttagcctttgcatatcctctctttcacgtgggtccaacaggtgttcggttcctggtaactgagtccttccatactcttgggggttttgataatcagctggtctggtgcatgttcctctagccacttagttgctgcgtggagccctctccgccttttgcctttcatctctgttaaagaggaacatgagcaaccgatggcaatcaacccaggtgtggttgtgggtctggataacagtctggagcaaatcaattagggcttgcggcttttcgctgtaggatggggtattgttttcccagttgagaaggtcagcagaggtgaagggctggtacacaaaaacatgcctctccaccacctgaccatcctcctttatcccagtataccgctggtctctcagtggcatttggatccccgttttgcatcgtaaacgagcagccgagggaggggtggaatggcgcaatgtgacttaccgcaattaataatctcaattattaattaacacttctaattatcaatattaataactgatcatgtaattgttaaaatcaataccgataataatgataattcatattaaagagttatactaacgataacaataaatgattaatattaatgatgcctggtattaataagtgatattgatcttattcattagaaaacagtaatattagcttgtaataattaatattaatattaataatctgaacactattagcaatgatttcttaatattaatattaatattggtaatacatattcatgtttatattaaatgaggaagaattaatatgaatattatgcctaatacctcagtgggtgtacacccacctatgatattgttcctaatgtccagagagggagagagcatgatattacgttcaatatcgcagcaggtgtacacccacccagtgatattgatccgaatatcatctccagaggatggcgtatgacgttactcccaagatagcagtgggtgtgcatccacctggtgatattcctcctcatattcctggaagaagagaatgctgttactcccaggatcacaggaagtgtacaccccttttgtgacattgttcctaatatccggagggggagagggtgatattactcgaaatatcgcaggctgtgtacacccaccttctgatattgttcctagtattcaggaagggagaggacgatatgactccccaaacagcagggggtgtacacccatcctgggatattcttcctaatatccatggagaggagaggctgataagactcccaatatggcagggggtgtacatccagtctgtgatattgttcttaatattcaaaggcggagaggttgatattactcccaatatcacagaaagtgtacaaacccgtgtaatattgttcctactatccagaagaaaagaggatgatattacccccatgtcgcaggaggtgtacacccacactgtgatattttttgtaatgtgcagggcgggggaggataatattcttaatagcacagggtgtgtacagcccccctgtgatatggtccttaatattacaagggggagaggatgaccctactcccaatagcgcagaaagtgtacaccaccccagggatattgttcccatgatccaggagagaagaggatgatgttactttcaatatcgcatggggtggacacgcccccagtgatactgttcctaatttcaacgtgggagaggacgatactacacccaatgctgctgggggtggaaacactcccgtgatattgttcttaatatccaggggcaagaggatgctattactgcaaagagtacagaggatgtacacccgtctataatatagttggtgatttccagaggctgagaagatattactgacaatcccgtcaacatgctgtgtgaccaccgtggattgtaatatccaggtggggagaggggggtgatattactccccgcatcgcgggaggcgcccgcccccctgcgatgtggatcgtaatatccaggtggggagagggggggtgatattactcccggatttttcctaggatcttttgtctactaccacccttgtttcacaccctgggacattattttccatattctagcaacatgccgctactaaagtcaccggggtatacaccctgcgatattattcgtaatattgtaggggaatgttattcatgttgtcacaggactctacacacttgagatgttattcacagtatatcctagcgggacattaataataatatcacaatgtgtgtacaccttgtggtcttattctcctaaggggaggttacttttattgtcacacggggcaggttccgtttgatattattcataatatcctagagggatgtcacctcttatgtcacagggtttgtacaccttgtcaaattactcgtatgatccttgtaagatgtgactcctcgtatcacagagggtgtacactctgtgatattatcgtcatattctagggaaatgtgactcttaatgtcacagaggttgtacaccttgtgaaattattcgttataattttgtgggatgtcacccctaatgtcacacggggtggacacacagtgatgttacgtgcaatgttctatagaaatgttactcgtaattcacaggtcctgtacaccctttaatattcttcataatattccaggaaaacgttactgctaatgtcacaggacgtgtagaccctgccatcaaattcgtaatatcctagcgggacttcactagtcatttcacaatgcgtgtgcaccctttgatattattcgtattgtcctgaagagatgttactactgatgtcccaatgcaggtacattctctgacattattcgttatatcctcgggggatgttacttctaatgtcacacggggtgtacacagagtcacacagtgataggagttgtaatattctacagacatgttactcataaatcaccagggctctacatcctgggatattattcataatattctaggggaatgttgctactattgtcaaggggatgtataccctgtgatatgaatcgtcatatcctggcgggatgttactactaatgtcacaatgcctgtacaccctgtgatattgtttgtgatatcctaaagagatgttactaggaaggtcacaatgcatgtacaccctctgatatgattcattatatcctcgggggtgttactcctaatgtcacacggcatgtactccctgtcatattagtcgtaatatccaagggggatgttatttttattgtcaccgggggtgtatgacatacgtattcaacgcctgtgatactattcctaatatcctaggggcatgctctccctaatgtcacatggggtgtacaccatgtgtggacacctgctgtgatattattggtaatatccaaggggaatgttactcctgatgacacaggtggtgtacatcatgtgtgtacaccgcctgtgttattattcataatatcctagggggatgtttctttgaatgtcacagagtgttcaaaatgtcacagaaggtgtacaccttgtgacgtgatctgtaaggtcggcagaggtgaaaggctggtacacaaaaacacccctctccgccacatgaccatcctcatatatcccagtataccgctgctctctcagggccagttgtatcctcgttttgggtcataaacgagctgccaagggaggggtttcttccgagtcttcacctcctctcttgtctactctggggggcctagggatatgcttgtcttgcggaggtgcaagcactgtggactcaagagtgggaagcctctttccctggtaaggggagcggatcaaaaacaagaaattaatgccaggacaacactattcagtaaactacagaatgtgttcagatgtcaccagtttttccactcatgtccttcttctttccccaaatcccacattacattgagtcccatgtcccccgttctcctccgatctgtgacagttcctcaacctgtacttgtccttttatgaccctgagagtcttgaagagtacaggtcaggcatttgatagaatgtcccttagtttgggtttgtcatgttttctcatgctttgatagattgagattatggatcttggggaagaatgccatggtggtgatgtgctcttctctgctcaaaatactgcgggtatgtgctattggcacatctgttgctggtgatgttagccttgatcatgtgattggatggcatctgctttccccactcaaagttgctattttcccttttgtaaataatacatattttggggaaagttctttcttcttatcccttttcttcttagtatcctatatcttgtcaaacttttgtccactaattatagtattgtttggtgaatcttgcagcaattattgctgtactgctctgataaagtttgtctactttccttattctgtctctatttgttaactggaattcttctgttctcccttacttgttatttattcaatcacttttttatgttagcattgacttatggttattttattctttgggttataaaaaatgtttttgttacttattttgttgctcagttttgttccaactttggccactgggagctcttttaggttggctcctgtgtccttttacatgatgtattccttttatagtttaaaaaatacaacagagtacaaataattaaaattgttgtccaccgctttttattttgttgtttcatttgaatgagagagtatgctgagactagccaaggagcaagtgagattcatttggggtacgtaaacaaatctttaaaagagttcctccctcccttccttcctttttccctttcttctttcctctcttcctccttccttcccttcctccctttccttccctccctccctcccactctctttctctctctgtatgcacaattctttttggcatatgaggctgaatggttgtaaaacgtagaatcaggaatctacctaggttgtgaaaataacatgaataacatgtggaactgtttcttttttttcgatcacaaagaataacaagaacttcatattgtgaaagagactcatgaaatccctgaacttgagtgctgcccaaacttcacttggggagaaaattacaaataaattccagaatattgatttgtctgatttttcagtgaaaggctgaaaagatgcctaaggttaattcatccctaataaaggaaaattgtactcactgcttgtttatgcatgctgcagtgaaaaagaaactgttcctaagccctggagagcaccccttaagttgatgatgtctttgaagcatagttgaaattctttgaagtaatgagattaatgaggaaaaaaaagagaaataatggatgtctgctgatgctatttcattaatgttagatttgcagtaaacatttaagacaataatccaagagagatgaatcattttatgatgtcacattgctgccaagcattgcagtgaaaaactccataagagcatctcagcctagctatccagagagccaacctgtgaaaaatagtgtcttaaaacatcagcctgtttgccttttttgtgtgtgaagatttgaatgctgatcttagaatactcaggttcatttcttgctacagggaaattaacctggctggaattaatgaaggccacagtggttgtgtttgtggaatacccagggaaagagctttacaagtttttaataatgttaactctccatatagctgggtgtagcagattctctcggtgcttcacctggagaccctgggtcttttaattagttaatttaattttttttaaaaattgaaaattaatttctgtaaggaggtggggtcttgttatgttgcccaggctggagtgagagcctgggtctttttactggttggatgctttcatccagctccctccgtgggtgggtactaagggattctcaggtgtaatgcgctgagatattgtgaaatattaacttggtcttcattcccgtttcctggcatacaactcctggagtccttgggatcaccaaagtgctgtcttttatgtgtcttttgtctgataggttcagggtggggctggttaccagagtggccgaggcagaatcagagggttgggacttttagccccaggaggggagaggggctgaaggtcaagttgatccccagtggccaatggcttaatcaatcatgcctgtgtaatgaagcctccataagaagaaaagaggacaaagttcgagagcttttggatctctgaacacgtggtgattcctggagggtggcctgcccaggtgtcagaggctttggaaccagagtgactccatcaaatgggtgagactggaattggagggactggtttttcaagatacaggccacaaagaccctgctgataaaataaagtgcggtaaagaagccagccaaaatgcactaaaaccaagatggtgacaaaagtgacctctgattgtcctcattgttcattatacgctaattataatgcattaggatgctaaaagacatgcccaccagcaccatgacagtttatgaatggcatggcaatgtccagaagttacctatatggtctaaaatgggaggaaccctcagttccaggaatacactacccctttcctgcaaaactcatgaacaatccactccttgtttgttatataatcaagaaataaccataagtctattcagtccagcagcccatgctgctgctctgccaatggagtagccacccctttacccctttactttcttaaaaaacttgctttcactttactgtgtcatcttgctcttgaatttctgtgtgaagcagagaacgtgcgtggactcccagcctgaactccaattttgggattcaccctgtggcatgggagggcatggaagctctgcaccctacaagtctcttcatcagtatcatctgtagtgtcctttgtggtaaactggtaaatgtggttccctgagttctgtgggctgctccagcaaatgagtcaaacccaaagaggggcttttgggaggccaacttgaagcaggttggtcaggagttccagagtcctggacttgcaactggtgtccggagtggtgtggtcttggggactgagtattcaacctgtgggatctgacgttatgcccgggtaaatcgtgttggaattgaattggaggacatccagctagcatctgctgcttggtggtgggcgaaacccctgccccctgcctacatttggtcacagatgtcatcttctgtgttgatgattgttgcggtggtatgagagcagaggaaaaacatggtttgggagagtttttcccaacacacgcaccttccagaaatggtgccctggctgggctcttcccccttccttgtttttcttccctcacaccttacaggtttctccttcataaaccccttgtgggtgtttcttccctgacggtctgcatctcaggagcccagcctaagatacttggtgtacttagcagatacatttgaacttttgaatatattgattgtgaaacttcaagaaataaatatccatcttgtttctcagcattgcttacatcaggaaattatagcccacatttatctaaaaatacattatattagtgctaaacgtttctttttagtgtttagatttggtggtcttgctcttaaggagaaaaaaagtaaaaagcagtttcttctaatatgtctgcaaaatgaatttaagaaatccatatttttctgatattttgtctgaaaagcacatttgaaactccataaggaaaccctttctcacatgttcagtctttgccagatctctcagaggtgttttgggagctcaagcttgagtctaagacaacttaatcaagtgggctttcaaggtttttgggagtaaataatctccttgatcctctgaacacaagtaaacatgtagtgaacatcatttctcatttttatcaacattaaaaaaagctggcaacaactttgatgttgaaaatgatcttcattgtgttctaatggccactttgaccaggaaagaggaaccagggcagacaagcagattgagaccttgtgactaaaataaagattctatttttagggaaaatgaactattttcatctaacattgccacagccttgctttgttttgagtaatgatatttaatttgttaagacgtttgaagtgacatgaaaggcatgttttgtgtgtttggcttttgcgttggtgaacgggggggactttgggttgcagaaggttttgagggctcccttagtgacctctgtggtctttccctacaatgacattcattgaaaacaagatttacttattttttcttaactaagacttgagtctgagtcagactaccttttcttccaaataaggatgttgtggaagttgcattaaattttgagtttcgggtccaaacactgagggacagagactgcagaatgaacctctccctgtgtcaacagactatgctaattaacatggttgtctttggctgatctgcgaaaattaaaagatgaccgagggtcctctttagctggacattctccctctctacctccttccttgcttctcctttcttctctcttccccttctaccctgttttcttctttatcttccttttcttccaattcatttctttcatccattttccttttttttcttccttttctctttttcttctttctttcacggcaactgaaatatacccatcccaaaataattgcagtcaacatgtcaccttttttaataataaatattctacaacattgacacaaaaggactcctgcagttaaacatgaagcagaaaattcggtggaaaagaagtgggtgtagacagcagggattgttcttgtgtgagggtgattcttaaggaaggcatttttaagggaggggtctgcaggggccagatgccagagagaattaaagctccatgccttggatgaggattcaaatccagaaataacttgcaggaatcgggagatgcctttcttgagaaacgtttgagctgggttggtgttgatcttaatgacctgtttaggttgtcttctgtatgccttaatttgcttttttgttaagtgggagcaaggattgtgattcctttccatagatgagagatattgtgagggccaagggcccgttggaaggcagcatggtgaggatgtcaaagcaccgagctgggagccggatctgggccttagacccagctctgctgtcctccaggtttgtaatcttcactgtgtacatagcttctgaagatcttttcctcatccatgaaatgagatggtcgagtttctcaaaatggggtgcattttcttggttcaaagctgttttgtgcccccctacacttttggatacatgctttttaaaggcataaatgtggtaaaaaaaaattgctcagaaattttgttgaaagagcagatggataaatgaatgctccaaattggggcctccaagcatgactgtgtgggctgtggggctgtgctatacacagcgccaagggaaagggggacatgcttcatgaagatggcgatggcattcctgccccatggatctgtggcagatggctgcctgatcccaatggacaaggattcaatgacctgaagttgctgagaagaacacgaggctcttgaaagatgtaacatcccctgtatccttctatcaagggtcgttttctaggagcttcgaaacaatccacttgggctccccgtcttcctctctccctagagaaacacaggtctgtgcacactttctgggtttgcagcagccttgggggtccaggacctgctaagaggacttggcagggcacctgggtcagcagaaacctcgtgttgacatgggccgggagagaaataacctgggtctcccagcacttcccttagaagctatattgtgtaagttaacaagccaaagaatccctcactgtctaaccaaggaaaatatttttatcttactcagaaagcagttccctcctttgtgcagtgcagctagaagaaaacaacattgtcttgggacacgcatcattactaagaatttttccgtaaatttatctgtgtgccttctacagttacctgtgtgtcccctgtggtacctatggaaaccagttgttgggaaatccttgttaaggtaagagcgtctatggaccagtgtgtcccaatagctttggatgggggaggctgagttagttaatcaattaacacattcctagcaccccctggtggacattgctggtctaactgaccttggaattcctggacttgcctgggctggagatatcacacccagccagacaccccccaccccgccccactgctgtggcccccacctgaccccgactgccaaccacgccttcttaattttctctgtgtttttctgtcgctttgtgtttgtttctcacaaagccctgatgaaactatcagggaacaaaggacgagagacaggggtctgaatccagagtaaagagtttcagttccaggcacttccttgggctcagcccatgcattgctgttctctgtatgtcagacaggagggggtaggtgaattccaaggctccttgtagcagaataatgcagtgtggtagagcctgggctttggggtcggtcagacatctgagatgttggtttatatctgagcttagtacttgaggcaagttacctcagtgccacgaactttagctttatgagctgtaaaatggggataataatgataatagctgtccctggatttatggtggagatcaaatgggagcaggcatgcaaagcccagctcagcatggcacgttaattatcaggctcagctcatggcagtggctgtttttattaatgccactgtgatcttccaatgatttgatccgggagatgcctgctgaagagagcaaatcaatctctacacgatagtaggaatagtagcatcgatatggccttggtacttattttgcatttggaaaaattccaaaatgcttcattcatctcaggtttttagtgggtaatttgtcccaagtcagtaccactggagcctggagccatcttcagccacgtgggtgtcatcacatccctgtctgcgagtgcagatttgggatgaagaccagagtcaataaggtaggaaatgacatctgcctaagtggccctgttggagcctggggaaagcagggctgtgtaggtaatgatgttctctgatgtttcacagctgtaactctgttccttgttcctgagtagggccaggcttttctggtctaggtgctcagccttcttctacttctgtatatctgtccttgttccttctcctttttcattccttccttgattttgctaacacacatagcactcgctgtatacttgcctcagtacttcacaggaaaaactcagttcattttctcaacaaccttgtgagctagttcctgtcattatgcccccttcacaggtggggtgagtagtgccactctgggtcctgccattcactgggagggagacctcaggagggaccaggtcagggctctgactggacactcagtactgacgtttggtatcaggagggcagagtgagacaaaggtgcgcatttcacactcagcttctgttaggggacacaggttttgttagaggacaattccccatggccctctctcatttctgcatgtcttgcaagcagaggcactgtctgccttttgttctgtgttatctttgcataacaaacattcttgggagacagagagagtgtctcccattggaacaaaggtgggcatgtgtattagtgtactttcgcactgctgatgaagacatacctgagaccggataatttataaagaaaagaaggtttaatggatccacagttccacgtggctggggcagcctcacaatcatggcagaaggcaaaaggcacgttttacatggaagcagacaagagagagaatgagagccaagcaaaaggggaaacgtcggatttcatgagacttatccactaccacaagaaaaatatgaggggaaaccatccccatgattcaattatctcccactgggtccctcccaaaacacatgggaattatgggagctacaattcaagatgagatttgggtggggccacagccaaaccatatcggtatgcttacttacaacaggttccccaagctaagcattgctgttctgtaatgcaacccactgcatatacagtattacctggccctcttcatgtggtcctgtggaaactgaggctgagggcactggtgcaaaaaccttgattgtctggctattgctgttgctgtgataataaagtcctttgtctcggattcgggagtctctcacgcctcctgtcagcatccatgaaacaggcaggctgacttgttggcttgcaggtagggtaaaatctcattgccttcacagttcctgacagcttccaggttcatgacttagaggaggcagaagtttaggattttaatgatgaatcagccatagcatccactcttaaattgctcatagactaatgggtgtagagggaaaaggatacgtgagagaatgacatacaagttaaacagtgaatactttcagagcagttaaggaaaagacagttgttgggcatggcttgaaagatgaatgagattttggtggattaggaagctgggcaacggagttctaggcagagggaacagagtgagtgaaagcacagaggtgcatgtgaaggccaagagtggattcaggggacagtgcctggttacttacaattgtaaaatatttctttagtaaggtgtaaggagcagtggctagaagaaacagcatggacttcggcgtcagacagtaagtccaagagcatgagagccagaaatgcatggccagctgggctggacagcttcatccattcttccagagtcaccctttacccttcacatcctgctcactgtcctggcagcctggccttgtccccttgctctgtctgggttggccaatgggaggtgccagtgagagatgagtgtgttgcaggaaactgaggacaggagagactgatacggagaacaggaggattgtttattttaggtactcaccggctcagtggattcatatccaaaaagctgagcattgaacaaagactgagcacagtttttataagttgactacagaagcaaaacaaaagcagctaatcatatgataggtcatataatctatagcataacgtaacttgtggccctgcatagctgttggccttgtgaaagaaaaacaagaacaggctaaatatagacatttgtaaaacacagctgtacttaagaagccagggaaaggagcagtaacaataaaggaatttgtctttctctctttttttcccttcaatcttgctctggcagggggttgtctggagcccattcttttggccttggcttctcaaacagtgttatcttataactgttcttgaagtgagattgctagacagaggaaaacttgttcttttcttcttaacccttgacttgcctgttacttttcttggagtgaatgaatgcatatttattttaagtttctgcctcaagtggatgagaggcgagtgaggtcagggtgttgatcttggctcctggcctgcaaggttgccttgggctgctcttttcctttgatggaaagtcactgtgccctcaagggggtctctaaccagcgctctctttatggatttctataaattccttcctctcaccttttcaagtggtaatggctgcattacaactagccaggtaaccacactctcctgtgtggtccccaaccctgcctgttaggaattgtgtagtccctgtggaaactaacacgcctcctgggatctgactggagcagactagcttccctgttgggacccgagtggtacagtggctgatggggatgagatgggaagaacgttaggtcaaaccctagaggacatgtgttaggagcctgtctgaagaatggtttcctagtttcacctaatgaactccattctccctttaagatccaactcagatgtctgcttccctggaaagattcccatgaacccatgccactttccatagcatttattgactgtgttctaattgcctccttctctatctctctctcttctgactgcaggtatctgatgaatctccatatctcttacactgcacacaataaatacccattgaatgaatgaatacatatatggatggatggacagacggatgatgcatggtagatggatgaatactggatcccatgcccattgagggtttgggtcaggggactgatgtgagcagacacacagaagcacgggcagcccccggcctccagcagattcttccaacccagctggaaagacatgatatggacttgggaattctctaactctgaaaggccccctctgctgaggtgtcccatgttcacagacagtgtgcatgaccagaggtcagaaagaagggagctcactctgctctgggcagggggagatcagggaaggctgcctggaggaggtgaggctggagtggggcattgaaggatgggaaaagttatgtggatggagaggcggagggaacaaaggcctgggaatctgatgggccaaagggaagacaggagacaagtaaagcttggagattttgtcgagaaaagaagagaggaggcaattaaggtgggagaaatgacaccagaaaaccactgaaaatgccccagtggggtttgttacttttaaaaaaaaagcaaccacaaagaaagacaatgaaacatccatgttttctttagtaaggtgtaaggagaagtggcgccaagaaacagcatggatttcggagtcaggcagacctgggctagaatttcacccttgctgatttttcactgtgtgactctgggcaggtgactttacctctctgaaccatagtttccttttctagaaaatgggccttgtaatagtacctcttagggctgctgtgaaggaaggataacatggaagcaacatgcctatcatagtgctttgtgtatggtaagtactttgttgatgttattgttaataatatgactactatagcctttattatgttttgttttgttttgtttgggggaatgtgacatttgagagtcctgggcattgtctgcagtagctgtggcagctgtgattgtgggtaatagaaggagaagtcatgcaggcacaaggctttttttcttctctgtttttttgtggcctgaaagaatgagatagcagaatattaatactgctatctggaggcttgacgctggggcctggcgggggcttgtttttgcagccagaaatagtctggcctttgcctttccagtgggcaggttgccaggccaacgagtgtgtaaaccacccggccgaacaaagcaaaactatttttaccttggggagcccaagaatgcatcacagagtttacgcacctgccccacccagcctggcggcccaagccagtcgccaatggaggctggtctgcggcaagcaagtggaaagcaaacagtcctgccccttggggaccagctgccctggcaaggataccaggtgttccagaaaggcccagagtaccccctctttctcctctagccagaaactctgagagagtttctgaagtggtcacgcaaggagcaataaaggtttaattttaccacctaattcgatatgaataacagcaattctactcatagcaatgccttccacttactgagattctgctagccacaggcactccgctaactgcttacacatgtcgtcatctcttagcctgtaataaatatctccatgagggtcatccccagttttctgatgtagaagctgagggtcagagaggttaagtgacctgcccagggttacccagctaggatgcagtttgaccccaggcccattcactgcagagtggatgctcttctcacctccctcactgtctccccacacatgggaagaacagggagggccagccttggagttgtcgtggggagaagggtgcctacggtcctgcccatgcagggctatgcaggcgtggaggctgggaagagactgggacagccccactgcctgctgataccagcagatatgcacacatactggagagcgagggtggcgccatgcctggttctctgctgagcaagagggaggccagggtgtcggagtctacagaactgaatcctccatgtgttaccatagtgaaggcttttcttcctttctccctccctccttcccttccttctatactcacctcttggtaggatgtggtagaaagagcataatttcggtagtcagcctttgttccctcctcttctccatgtacttgactcttttcatccttcagtgcccagtgtcagcctcgcctcctccaggcagcctttcctgatctcccccttcccagaaaagagtgggctcatctgacctcctgtcgtacccactgtctatgagcatggaacacctcatggagggtggcctgtcagtgctagagaacttccacgtgtccatgtcatgccgtcccacctgggttgaaagctgcttgagggtaggggctgagtcttgggcttcttcatgccactttgtattactcctctgcctcctaaccttccatgacttgtaccaccctttggattgattattcatccactcacctattcaacaaatactcatcaagtgcagtgtcagttatgtgaagatgcctgagatgctatcctgaagtctagagtcaatcaggaaagagagctaagaaaggaggtaattataaaacagggtggtgggccaggcacagtggtccaggcctgtaatcccagcactttgggaggccaaggcagtaggatgacttgaggtcaagagttccagaccagcttggccaacatggcaaaaccctctctctactaaaaatacaaaaattggccgggtgtgatggtgcatgcctgtagtcccagctactcaggaggctgaggcaagagaatcacttgaacctgggaggtggaggttgaagtgagctgagactgtgctactgcactccagcctgggtgacagagtaagtgagactctgtctcaaacaaacaaacaaacaaacaaacaaacaaaccaaaaaatgaagcagagtggtaaatcccatggaagaggaggcagactcatcgtgggagccagaaaaacccacattcaaatcccggctccaccacttcccacctgtaggagcttggtcaagtcacttcctccctgtgcctcagttttctcatttataaactgaggctaataacaattctcaactcacagggttgtagtgaggaccgaatgagatgatgtggccttttcgtcctttccatcatgttggctccacatgggcaggggttgtgtcttcctcgctccccgtcgtgtccccagcctagggcacatggtggggcatgaggactgtttgtggaatggctgttgctccgtccctgggtcacagtcagtgactgcctggtgctgtcaagaggggctgagagtccaagaattggaacgctcaatccataagcaggttttgtgccaggttgggaacacaaaacagggcagaggtggccaggaggcgggcagcagcgaggttccaggaggcctcatttcctgtatgttagaagaataaatagtaaaatgtgtcctggaccaaacctttgttccttttcttgccagacttgcttatgggaaaattagctgcttttagcagaacatggaaaagagggagagtatatattgccagaggtttaagtttctcaatttcaaacctaaacatgaaggcttttcagttgtgtgttctgtttgagatttgcacaaacctggtctctctctttctctttttgtctctctctctttcttaaaatcttaatttccttggttattgttgaagtgggacacaaattattaaaaaacagaacaaaccacccaacaactagaaactttgttttcatagcagcacaggcttatatttagttagaataatattcttttgaaattcaatttcccttattccacagtggtaggaggagaagaaaaaaaaagtggagatatctgaaacattccccagcattctgaacttaggatagaacagagcgggttttgaaatcctggcctgtgtgtttgcctcccgagtcttctgctctaccttcaatcattcttctgacaaaaacagaagagcgaggggctgtgttatcagttttctgattggctctgaacaaaggaatggtgctttctctccacgctgtcagctcattgatgtcaatcagaaaatggattcgaggcatgtttgggattccgactagtttgtgtgcataacgagttccaagtcaatattttcagagggatgaaatagatagaggttgtggggactaatgggggcaagaatgacccactgagaccttgggaagccacccactgtgatctcggggaggccacacactgagacccgggggaagaggccacccactgtgatcttgaggaggtcacacactgagacccgggggaagaggccacccactgtgatcttgaggaggccacacactgagacccgggggatgaggccacccactgtgatcttggggaggccacacactgagactgggggatgaggccacccactgtgatcttggggaggccacacactgagactgggggatgaggccacccactgtgatcttggggaggccacacactgagactgggggatgaggccacccactgtgatcttggggaggccacacactgagactgggggatgaggccacccactgtgatcttggggaggccacacactgagacccgggggaagaggccacccactgtgatcttggggaggccacacactgagactgggggatgaggccacccactgtgatcttggggaggccacacactgagactgggggatgaggccacccactgtgatcttggggaggccacacactgagactgggggatgaggccacccactgtgatcttggggaggccacacactgagactgggggatgaggccacccactgtgatcttggggaggccacacactgagacccgggggaagaggccacccactgtgatcttggagaggccacacactgagatctgggggaggccacacactgagatttgggggaagaggccacctactgtgatcctggggaagccacacactgagatctccgggagaagaccacatactttgattttgggtaggccacacactgagaccttggggagaaggccacacactgtgatcttggagtggccgcacactgagaccttggggaggacacccactgagacattgagatatttatattttccctggagctccggcatctgtctgtaaagtgaggtgctacggttctattcctactaatttaccctatggaaacacacacacatgtgtagacataagtacaaggctatctttaaaccacagcagtgtaactgcagggaagtaggagacaatttgggtgtctattgagaggagaatggttaaatacatcatgatacattcctacaatgggaaactacgaagtgttagaaataaaggaaactgagatgacgtgggtgattctacaaacatgatgttgagtgaaagaagccagattcttttgttgaaaattcatctgttgaagccctaccccctaatgtgatagtatttggagatggagtctttaggacgtaattaggtttagatgaggtcgtgagggtggggtccccaggatggaattagtgcctttctaagagacagaagaaagcttgctctctctctttctcctctccacatgagggcatagcaagaaggcagccatctacaagctaggatgagagccctcaccagaacccaaccatgctggcaccctgatcttggaattccagccatccaaatggtgagaaaatacatttctgtcatttaagccaccagtctgttgtcatggcagcctgagctgactaatacaagtgcctgctgtttgagtccaaatgtatcaagttcaacaggcaaaactgagccatgctgttacaggcaggggaacggttcccactgggtggggtggaagggtcgggaggtagagagtgagtaccggaaagtggcctaaagtggcttcagaatctggtcatgttctgttcccgatctgagttttggtcacacgggtacatttactttgtcaaaatgcatccagttgtgtttttaagatttgtgctttttaaaggatttgtgttataattcagtaaaatgtatacaaagaaaaataatctcattcaaaaattatcagtaaaaacaaaagtcttgtgaacaatattttagttatttctatgttattcgtattcagcccagtgcctgaatttaaaccggattgtgtgctaaatgtaaaatctgctacagcaacaacaataaaatgaacaaggtaaaactgtgtatgctgttgacacagaaagatatccatattgtattttttgtttcttcttaacaaaaaggatgagcaatatttacagcatgatttcatttacgctttttaaaaattctaagtgtatgcacacttataagcaaatttacatgtaaattgacatgtggacattggaggtggggtgaccattagtttttagtttttaatcttttgaatctttgattttttaaggattaggatatttcttttataaatataaaaagtaatggtgaaggtaaataaaagaggacaatgaaagtgagtttggagcagatgacatctgcggctcctgcctcttgctctgaggtctgtgattaacattgaccttcttcatgtccagccagatggatgaccaggtttgagttggatgacatacatctccatgtgattctcaatttagatccaaaaaggtgtccattcttgtggctatcatttcggtttttggttgtggattctctttctccaagtggatgtggagctggctctggaagccaggtacaatggcagagcttcagggcatttaggtagccgatccccaggacaaagaggagcccagtctcctccccactcccagggagatggcctgagggaaagggggagtcagtcacatgcttatattccaaaataatagacctgtggagagtggcctgaagacacagaggagagaacagttgtttctggtcagggaaatcatgaaaggcttcctagaggagggggcatctgagatggtccttggagcatgagtagaagtttgccagggagaaaatggtagaaggagaatgtttcaaatgggggaaactgtatacataaaactcgatataggtatatcaggggaaaacatgtgagggctaaggctggaaaggctgtttggaggctggctgaagatttggactttatcctagggtaataaggagccataaaagatttgaagcaagacacttaatcagatctaagtaggcaggaaaagctttccacccttcccctttctttcctctctcttatcctcccttcttgggagggggactctgagcagcaggaatagaagacagtctgggtagacatgataagcattgaggttatgccatggaaggcagctgctattagtgacacaaaggtttgcttgacttgtggatgtctgattgggaaaaatctggagatggtaaagccatttctgttactggtctataaggctactcctgatcacagagcacctgagaccctgggactgggggagattgtggtacaggtgcagagggaggaagatcagagagatcccgaggagggctctgtgtgcttggatcaaggactcaacagggaaggtgggagagttctgtcgcactttggacactgtgtgtcatcctgatcatgtgattgtttgattttccttctggggatggatggttgacctccaccgtttcctggtcatcactgtgcatgcgggacacgctgtagaacagctcacactggctggcactgctaagcaggtgcggaggggagtcagagacccccggatggaggggtgagtgaaagcctgcctgaggcagtcgccacggagatggagggaggagagattggcaggaggtgtgtgtagtgggaagagaagagacagaagttgaggataattaggggtttcctgtatgtgtggctgggcatgatggtgaagaggcagaggaggggaggagctggcatggggagaaagagaattagggtggagccatgggaacacatccatccttgctgagggctgtctctccagttgacattagatgggaggcctaacatcaggggatggaggaaaaaatgatttctgccacttttggcttcatgggagactctgcagtggggctatgtctgatgttacttatcgctctggtacccatcaaggtctctgcaaggaatcaaagctctttaataacatgtgaaaaaaatacacgattcctcattctgctcctgctccccatttttgtgtggccccaggagtcacttcacctctggggacctcagggcaacattcaaagtgtatttgtcatggaggaagccctgggccatggtctgctactcactgccatgtgagcctgaacgagtcctttcctttctcttggcctcagtttccccatgtgcacagtgaagaagtagaacaaaaagaattctgaggtcccaacaagtgctcaccgtcagcaatgatggcttccctcacttgcctccccgcttgctgagatagccgagagatgcaatgggctggatcccgaagcatttatgacagaaacccctctgcaaacacaaggacgggaagttagtgttgtcctgtggcctgggaaggctggtggtgccttgcaaagcaaattgaatttgtgtttgaaaatttcagtgaccaaacagactggccttttaaaattccaaattggctttgtagataaatggatcagattagtaggaaggaagggagaaacggagggaccgtgcaaaatgcgtgcaattgctggcaggcagccttctgccttatgagattagcatctctgccttttgctggaaatgagccactctgttctccttgcctgccaggagccacgatttaaaacctcttccattttctagcccagtgaggacagcagccggaaccacagaaactggttttagttggtttaatctgaagcccccaggctgggcatctgcactgacccacaaaagagctccctgggaaatgtcttccagagtcaaggccacggatggagcaggagctgtcactggtcagttttccaaccacggggatggagcgtcctgtagtcccagcttccagggaagcatccttcattaaggcttgagccacagggtcaaactgaactccttcctgctgttcctataatgtggcactcagactggatccctgtttttgaagaagtaaatgtctagaaacagggacaaactggtatttaaaaattactagtggccttcttttttcttctatcagtttccccacagttggaacaaagcttatctttggagaaaactgtttagaagtccaggacaatgggaagataaagtccctgcataagaatatatttatttattcattcattcatcacatgtctatagagcatctattattttccaggctctgttcacagtgctaagtatacagcagggaactaaacagacacaaatatgctttttgggatttttatcttggtagcctacatccagattatgacaggtgttgaacaaaacacatagtaagttagttaatgtgttggatagaagtaagtgccatgaagaaaaacaaaagcaggaaagagggtctgagactggagatttggtggtggcggcagggtgttcaattttaaataggggccagggacagcctccctgggagagtgacatttgagcaaaggcctgaaggtggtgagggaacagtttgtgtagagatctgtaggggaattccaggtctccagtacagcaagtgcaaaggccctgaggtgggaatgtgcttggtgtgacccaggaacgatgaggaggctggtggggctggaggaaagggttgaagggaagcaggcagaggccatattggtagggagggtgcagggggtcgctcgcagagcacggcaaggactgggcttttagtccaagtgattttgcagccaggaagggtgttgagcagaggaggggctgtctcctgacttacaggtgtagagggatcagtctgagttctgaattgagcatgggctttgtcagggcgagggcaacagataggaggcccatgaggaagtgactgcagcaatccaggtgaggggggcagggggctcaggcacgagtgggagcaaggaagcagactgggagaggacccaggcagatatgacttgctgacattgaatgcgggtatgaggaaaagggggagtgaaagcaggtggagaccagaagttcagtgctgaacacacagagagagctcgaggtgtctgttagacaactgaggggagatgtcccagccagatagaggagtcaggagttcagaggagaggtcaaagcagaggcagaaattgggaatcatgagtgcgtggacgaccataacactgaaggaggtcaccaagggagtgagcacggatggacgggcacacaatgggtccagacaccctgatatttagagatcaggggagaggagccaccatcccaccttgcccgctcctgggacctgctctgggaatgaggagaaatgcaattcctgccctcttcatgaactgcaggagccaggagatgtggtaagatgtggcgaaagttcctgttgcaggcagcgttcttgggaagaagactttgaggaggaggacctttgtgtgtgggaagttagctgggggtgctcttgggatcaagtcctgtgaggaagcaaaggcagcaggatttcacagagggaggagttgagttgcgctgcagtcagggcaaaggtcttgcccattgttggagggtaggggctcagaagtagggcagcccttcagagctgccctgaatgaaggcccagggtgagtcagggaagggcttggccaggtgctggagatgaggttctcatcctgaggggacctgggagggcagcccagcactcactaaagcacccaggggaaggtgaccaggccaccattagacggtgggggcaggccagagtctcttaagaaagttgatgagttgggttcctggagcatcaggattggtagagtcctggagctgcgatgtatccagggtcaaggttaagttttgtgttgtgtttaatcatttccccacctgtgttttgggagccttccaagaggggcctcagctacatcaagggaatgagggaaggggcactgtggcctggaggaggtgatagagggaagcccagggcagcagcagaccagagtcacagaagggagtagtgctttggtgagcactcattggaagcttctagaaagacttcaggatgggggggcaccagctaaagtgtggctttgctgtcgctgaggagacaaaggttcaggattggctaggaaaaggaaaggtggaaggtgaccttcctgaaggcctctggcctgcgggcatcgtagtttctcagctttcctccattgctttctgttcagctgattgggtagccagacttacacgggccaagccactaagtagccaggtcagtgaaaaccatgccacgctccttcccctagcttcttacaacgacacataacaacacacagaattgtttgtcatctacatcagggccttggtgccaacttgctctcattcctgttctgccgcaccagagctgtgtgaccttgggtaagtcactcaacctctctaagcccttgttgtctcgtctataaggagaacaatatctatcttacggagttgttgtgaaggtttaactgagaaagcatctgtgaacgcatctcccttcctatgtggtatttggggggcatcaagaagatctcagtccctgttttctgtctgtgcagttagaggtccacgacttgggcctggagggatatgccagtttccctggctcccagagagaggagggtgcttgggcatggtgtttcgagaacctcctacttggacaagtttcttatttgtgtcaagcccattctcctccactccatacttgattcctgccatgggcaccactggtctccatccacccagcctgcagataagccaacaacaatgttatctgtggctgccaggccctttggggcagaactcctttgttggcagtcttggctcctgtgggggttctgggtggctctgggttcggttgggttgtgagggcccgaggcagggcctggttcctggtggatgtgcagggagcattcactggatgaatgagagtgagggctctgtagatggtggggtgagaccttcgtccagcaggagctgagcaatagccggcttctctgagacaaaaagaaataaccagaccaggcactgttcaaggttctgccccctgggagtacttctcctcaccacggtccttcagggatgttctggaaaggggctgcagtgctgccatgtccactttaggactttgaactcagtctaccctgactctgaagccacagactgtgatgttctactattgctcacaccccactttgtttaatcaccaagcttctgcgttaatattcttccaaagagctcagtccaaaggcaagaaactcttctcactagaaagtttctttgttcagccgaaaatgacctccattccggaccagctctccgcatgcctgcgcatggataggacaggtgtcctgagattctgttctgctgctgccttcccacatgcccctttaaacacttgaagacagttattgaaccttgcttctaggtttttcctcactatcatgttcaattgcagtctgaccacgtggttccttgattcccttctaaagctctgccctaccctaattcttgctgcagccatgacatatcccaagacagacacccacctgtgagattacatagattttatttccaggaaaaaacaaggttcttagacagcaatcaattgatagagtcagctcctggacagctgtgctaattccacaaatgtttcttgagcacttagcacatgcaggacacgagggccagttcaggaggagctctcagagcccactcatttccatcaacagcagggaggaagaatgactgtcagatgtcaggcacatagtgggcgcctctcttccctgatcccaacctcctttgatagtaagaggcagggaccagtactagcctcacactgtcgtgggtcccagagctaatgctgcttgttcctgctgctaccacggatgttaggtgttgatgggtacattacttgccccgagtcactcaagcacactgttgcagacagcacttctgtacggatgccgaagcaagatcagaaaggtctagctgttggtttgtttatcttccatgcgttttaagagctttttattaacttactattatgtgatctaagtagcgtgcagaaaaggactgtcatttctgctgatcagcacttcctggttacgaaaatacagctcagcgttgtctgcatttttgcggcctcaagatttcgggtccttgtaatgcttaattctcttcaacattttgttcaatttgacatttaaagaattttctgtggttgttccttttaaatgctgaggagggttttaggtaagcatatattgcgcttaaaaagtactcaagatgtaatagtggtatattgttttagttaagttgcaagcattttgtcattaatctatcatttatcatgttttggctcaaatatatacacacatgcaaacacacacctaaacagatacagcaatggatgctcacacagatgtttagggtaaaatatacacgcagagaaaggcatacaaattcatgataaccccatttaccatggggacaattctataagggcttaaaatcattgcttcatgtataaaggcatcaaaagaccacatttgttcctcaggatcatggtcttccttgtgtatacacagtaatgaaacttatatgactctcaagtatcagaaatccagtgctcctaccagccataaaaatcgatttgtgaggactgagtcacctaagaagcatttgtgaaattgtgaatactgctgaaggttgcacttgcatgctgtcggcgatgggcagtcagtgacgagggtgaaggcagtagagagaataaagacacgctctttatggagcagctgggagccatctctgtgcagtgtggccatcccagacaggccgacatttaggacactgacaaaatagtcctgatgcttcccctggtgaaggcaatcccaggttgtcattgaggaatatcatggcacatcccacgtgcattgctgggatggggaagtcaaggcgtagggcagtttcatcaccctggccagagaaccccaggttcagctgcagaggagtgattgccaaggatgcagtggagggggtgggacccatagagcctcggggaccagctcacaagttctgtgtttagactcatgcagaggaggatgatcttccaagggctgaggttgaaggggtgtcaaactccaatggaaaaggtttaggaaaagaccttttacaaatccaaagatgtttcacagtgggcgaggctggtgtggcgacagtagtggcccacatggctgggttgggagccagctctgcccatgaggtgccgtgtggctttgcagtgtggcctcacaatcccagctttgtttcttccccagggagatgaggctggtgatgctcaagatctcagaggccctgcccaggctgagtatctgtatataatatcccccttggggaggtaaccttcttgtggttatgacctttttctgcatgcgccctacaatacttaggagtctgcctcctacagctgggcgatgtagctcagttgtcaggcactctgactagagagtcagactgatgagggtttgaatctatcatcctgctcagaaaaatgggcatgataccagtgcccctctcaaaggggtgcagtgaggacatgagtaactagaagcatccataagagcttggtcagtagaaggctcttgtggaagaggagctcccagaacccggtggattgggtgcagagcagctgctatgatgaacgatatagatgtttccctttgttgtattccaactgggtaacaatgggcctgctgttctgggaggggcctgagggtggtccatcagagcacatcggtccaagcacactcgaagggcagacatctctttggcaggacgtctggaacatggacagggatctgaatgaagatgacagtaagtagagcctcaaagatggcacggaagactgtgtggagatattttagcctgcatttgaagaggacctaatctgacctctaatatgttggaagttatgtatccatagtcttttctaataagctctgtagctagcactgtgtgaactcttccatctgccctaaatgcagtcctgggtctgcatctggattgccgagagcaccccttccttccttccttcctctcgtgtgtaaagcctacctgtagcttgcgatctcttcttccgttatgagcctttggacaatggagaaggaaggtgaaagatgaaattgagaacttttctctctatcacagtgacaccatgcaaaccttatattcttttccctttttcttcttttctctagttgacagtgtctcctgctcccagccaaatctaagtgagattttcaggattcttatttcaatcacaattggattcagttcttagatgatgttaactctacagaaaggtcgggaaaaggcttcactcgtgatctttctctagcaaacggccagttcgttcattatcgcttatgaaacatagcccaggtgaccccatcctgtcactaccgggacagaaatacaatggattctcagagctatttaaaaacatgaaggaaatggtatttcaggaagaaatgtgctatgttttaaaaagggaaatttttgaatccgaatttgaaacaggcagtgcagaggggtggtggttgccggtggcggggagtggggaggggaagagcatgagactgagaagtgggaggccagggttcaagtcctggctctgctctgaattggctgtgtgatcttgggcaaatcacttaacctctctgagctgcaatattctcatctataaaacgagattggtttaggtctcaatctgaggaccatgagggtgtgggcaaaatgctttttgagcatgctttttgggagatgtagagagaggtctatagctttcatttgaatccagagagatccatgacactaacacaacttcatagtcaccagacttgatgacactggagcttctttgcaggcataacactctttcttgtctttaatgttgatatcttaaagctttaagttttagacctgaagcagaatatgaaattaacctatactaaacttagagagctcaatttaaattttgttggaatcttttttcatattgaagtgaaagactgcctggagatattttagcatgtattggaggagggcttaatctgacctctaatatattggaaattgtatatccatactcttgttctaataagcttcaaataacattctaatgcaatcttttttcttcaaaacactgtttattagcagtctttccatttatgattagagtttctcatagtagcaatggactaggtcagatctggactcaaacctatgctctgcctcctagtttctgggtgactttgctcaagtcacttaacctctctgaatttcatttcccataattttttttaaagggatggtgtcatcttgcaggattgatcaaagattcgttggctacaaagtgcctaatacatcaccagcccagagtagacatggagtcaatattgactctacgaaatgatcaggtccccagaactttaaaagtaaactgctattaatgggaaatattatcttctgtgaagttcctgttttgacctcatgccttttggtgagcaaggtgagagaaaagtgaagtctttgggcccattacaagtctaggaaccctgagtctttcatagggttgtcctgagtgctggtctcagatgtgatggaactcaggtgagcacttggggttcactgcaaggtatagaggcacccagggaaacttttagaaaaagttaatgaaatcagaaaccaggtagatttttttttccccaagtgtcagaaagggagcctgctacaggccttacataatttaaatgtgcctgtttaggggagaggtgattgcccattttatccaatcgagttaatgttccaggcactatagtgttgtcccatcacttttcaggtctataatatgagtgacttcagggggagaaaacctttctccagtgatacgttttgggacaaaagtgcatggataggaacgttctgggatgtggcacccatgtgcaaatctcctcaaggaggcctttgaccatcaccttcaggtgctggctgtctacagcatccctgaccagggcagcatctcctactttggctggaccacttccagtgatggtctggttctatttctatagtcgagactgtccaaaattctttcttacattgaatcgctatctctctccctggagcttctactctttggtcttgattccaggctgcaagtctactcagaatgtctgttccctgtttaagataagagccctgtaagtcttttcttttctagcctaaccagatcctgtttcttcaacaatcctagaggtaatcactcttttcttaaagtgcagtgtcctagcacagagcggaagagaaaaaaatcccctcccttattctatataccatatcttttgtgatagaacttacttctttgattgcagactgaaaccttttccagaaatggtgagcaaaagcctcttcaagtaagatgggctataaatacagtctctggtaattttaggaggcagcttttctggtctaggactataagacatgggttgtacctttttactcctgggcatgagttcctgtggacccccgtccacaggggcaggattgagatcacgagtgagagccctggtctggggccacatcgccatcaccacccctgacccagtgctgagcagctgggactctcccttggtacccaggccagctctgctcccagaagtcttgttcatagaatgcccctgccctccacgactagggatggaaaattgatactagctttcaggctctcagtgtatcttggtgagaaagggtgctggacttcttggcaagggccaagctgccgttagctgtggtgactgacgggggatctcagtgtttttcacacatcccgtggatggaggcacagccaccggaatgcagctttcccagctaggttagccctggcctctaggggcccatctggtctttcccacaggctgcacacttcgggagggggatagtggttccggtagcccctaataggaagatacagcatctactttggggagtgagtaagaaataaaaagcttcagtgaaattgttacagcttagacaggatccccaggctctcctgaatcagtttccagagtcccctctcatccattgtctcatttgctcctctcagtgaccctactccctgagccctgcttttagggaaaggaaatcaaggccctaaaaaattgagtgattttttctccccaaagactgcgtagcaggttaggtattttgtgctgtggtcattgctgggaaaatgaggatgaataaaacattgatctacctttggggtactccaagtctggtgggggacacagaccccacatggaccttttacaaaggattcttaagaagccgtttggcaaaacaacagtggagaagtggagtggagtgccaaggggcacaggacagggagccgcactcaggcaggctttggagacggggaggtctaagctaagtctggagggggtgcccagtggtgccgctggcagaaccagccccagccagggctggggaaatggcacagggtgtgtgagggtgagtacaaatgtctgtatcatgaagccacagggcacctctgggaagcccagtccctgtgtggccctgtcttggcatgacagcactttctaagaagcattaatttcatatttcaaataattgaaaaatattgacaaataacaatctcaaataattgaaaacaaaaattgcaatatttgctgcattcttgcttggcaacccagggtggcctacataacttaaagcaaatcttctcccaacccttcacccatttctcttgatgttggtctcacggcatggtgaacatttgcttccccaaatattttttcaatggctcccaaaccaactattcatgcttctctctccagcaggcttgcctttctccttccttctttctttctgttctccttgtctctttccttccttttttctctgtgttctttttccctactgttgccgtcttccacagttagctgccttaccttctctcaccctggtctgcacatgtaggaggcttttccttggcatgtgggcagatgagaatcctttcttcctctcttgtgggtaagggcatctaatgtagggaccttacctgccaaattcaggagcttggatttagctgtgggtaatagtgagtcactgcaggggttaggtgagggggtgatatgatcaggttttctggtcttgctaggaagtacttgaactactgtgaccaattatttgtttgttctttgtggcaaaaacagaacttctttcttttctttctcttaggatcacctgtcattctcaagttgtttttatttgtgataaaatatacctgacataaaatttgccatcttagccatttgtaagtgcccagttcagtagtattgttcattcacgttgttgtgcagccatgaccatccttctctggaacccctttcaccttgtaaatctgaaattctgtctctattaaataattccttattcccttctccccacagcccctgtcaaccatcactctactttgtgtgtgtgagtttgaccacctgaatctttttggcaccatctcaagtataattcaaatcacgaggcatttgtgcatatcgacaatacacccatcgtggtaggtttgctgttcccctaacacttacgtgtgcctgttggattcccactctttgtttaagtgttgaatgccattcctttcttatacgagacaggggcccctgtccaaaaggggccctcacacctgtcaaaggagacaatgtatgaaacaaactcaagtaagatggtgatgggaagccctttgagcacgcttcagtgcttttaagatgattaatgtggaattagggacaaaggacattgatttcctttctcatctgtagtcaagggaatgacattttaaaaagagaacgttaaaggggttacccattaataatgcctttctccacaaggaaaattcctttctatacaaaagaaaaatatcttgtgggtggtgagctgaaacactaccttggcgactctctttgcaaagtcttctcaacattcacctgatgctctttgcatggagccatagggtgttcagctaagtagaaaggtcactgggcttggagacaggatctgagctctaagtgctatttctatctctgccatgcgtgtgtgagcaaagttgccccaaaccacatctttgagtctcatttcattcttctctgaaatagggaaaactggttatcgtgaagcacaaaggagatcatgcctacaatgtccctttgggagccacgggacacaatgtgtgtgttagggcggggtggtccagctggacgactgcctgaaacagctgcaacaccatgggaacagcaatgtggctggtggccccttccgagtgccccgtgctgggtgtcacacaatgccccgtgacgtccacattccctgctgagcccgtcaagatctgtacaggaaacgacacctcctccttagttgagtctggagtcctttatttttgtacataacagaatggcgagattaatttagctctgatgaactgtagctgctctgagaggtcagggtggctcctggttgaggaatggagtctgagtttcccacctctcattcttccccacttcctgccccttttgtttggtttccagcaggacattgcagccgaatggtatttccctgtcttctcgtcaagaggagtattgatgccccagcagacccaagacttgtgggtgggtggggggccatcccaggggacagggctgtgacagtctttctatgcttgatattttcactgttgtcttctggcttaaatgagcacaaagaaaggggaagacccacccttcttaggttggaggcagtgactgggttttgttaaaggccaggcacaggactaaggactatgcacacattgtctcattgcttgggtattaatatcaactgctctgttttgcataggagggagttgagttctacagggatgtgtggcttacatggtgtcacatcatgcagagagcctgggcccaaggtgacatgtcagaacccatgtttctaaccatgctgcctttgggtttctgactccggtcaaaatgtggcaggaccattggctcacaaagatgtgttttcttgcttacaaaggcactctacgtctatgaaacttttttctatttaccttccttgtaggttttctgccaggaggaaaagaccttagagaggcagatagtatttcttattgtcagaggacaaggacattcccagtttgggaggtggtagagagggggtgttcattcgtcttaaaggcatcccctccttcctccactgcttgggccatgtatttcagggctacagtccagccctgaccttgatctttaattctgataatggagctgacagaaactacagtggacatgcatgggccttcgccccagaaaggctcaggtttcagcctctacctttctgatcccctcaagcccattcccaggagaatgtctaagtagacacacaggtgagtgtctaagtcagggatgggccaaacgtgactccgagggccaaatcggacccaccacctattttcacaaatgaagttttcttggaacgaagcttctattgtctggtttttgtttttattaaacttgaagggacagggtatattatttttacttttgtgaagggagagagctactacgggctttaaataggttcctcccaccaaacaaacaaacaaacaaacaaacaaacaaacaagctctaggagatggggcagttcagctggaagtctgctctgagtttgcttcagtgactgagacagacggtgtccccttccatgaccatttcacaggcactatttgaagtcaactcctgtgactgacttggccactagacaaacagaaccaagggattcttgtctcccagtgtgaggggttgtaggaacagttttaaaggggcggcccagtgggctggaactagacctcttgtttcagaggcctctgggacctctgtcctgctctaactccacagctgtgtgacctaggattactggagtaatctctctgagcctcatgtgcctcatgtcaagtggggtcagaagtgctgccttccacacccccaggtgggagtgtgggatgaggcaacatgtgtgggaaggtgtttcatgaaccttccagtgcttcaggggccagttcttatattatgctttcctccttggcatctcagggccacctgtatctatgtcacacccgacaggctaggatgaggttttgaaaacagatacgtagtgaatgattttttcatagttttgcctcatgaaaagtacagatactactccacctacagtggggttatgtcccaatacacccatcataagttgaaaatatcagaagtcaagaaggcgtttaatacaccaggcagtggtggagtgggagctgtggttcactgccgctgcctggcgtcacgagagtgtgtcatattttctattgctagcctaggaaaagacccatattcaaaatttgatgtttggtttataatgaatgcatatggcttttgtaccatcataaagtagaaaaatcaataagtccaaacatcctaagttggggactgtctgtacttggaaagaacacgaactttggagtcagacgagtctaggtttgaatccagccccacccaccacttgctggttgtatgatcttgggcaagtcacaacctttctgagcctcagtttcctcattggtggaatgagggaaggcgttagtgtaccagtttgggtcacccatgaagcagacaccaagatggcattagatgtgcaaggggtttcttgaagatacctgtgaagagaaaagaggagggaatgtcttcagactgcaatgcaggtctgacgtttgtgaagggagagagggaaggaaggagattaagtaggaggagtctcagactccatgtggctccaagaaagtcttggtcaggtctgctgggaatcccagagcaaagattgtccactggaggaagctgcataacaaatgaccccacatctcggtgccttaaaacaacaatgtttttatgtctcatgattttatgggtcaggaattagggtagggctcaggcaggagattcttctgctccacgtggtgttgattagggtcatccagtggcattcagcaggtggctgatatggcttggagggtccaggatggctttgctggtttggcggggatagctggaaggctggactcaactggacctccttccatgtagtcttagggtctcctcatggtccctccagcataatagcctgacttagagctcagggttccaaaacaaatgctccatgaggcagaagtagctgcagtcttttaatgcttccactgtgttctcttggttgaggcagtcacatatcttcccagtttccatgaaaggaaagcatcaaagaatatgtggccatctgtaattccacagtgaattacagactcatgaatgcaataatgcatattcacggagtaggtacccagcaaataggagctggcattcttgatgtttctcatcactattattactgctgctactaccacctgccctgcagatgtattctgtgtcctaaggatgccagagtgaggctggcttaaacgtgaggctttttataatgcacccgccctaatttctcaacttcctgtgaagccctcatcagccctcgcctccctacccaaggcttaggaatgcttgtctttctgcaggtgtggtggacctcagttttgaggccgagagtcctctggcgccccccacagagctcctggagagactgcccagctatgactggcttcttcaagggggcagtaagttccaagagggcttggttctttgggcttctacctagggctcacgctggttggtgggatgtctcgggaaaaaggtggtgctgagatagctcccctttccctgggggggccctgggaagcccctcatcttgggcaggtggaaagaggaagcaatggggcataggccttctgtctatgaacagtccatgactgcgacaggtcccactaagacctagatggtgctggtcttggagtccccattctttttgcattaaatgcatcactgtttcttcatctgttctttctcacattcaatcagtctttccttcttccaccacacaaatatttgttcctttggcctgggctgtccagcccctgactcttcccttctccaggaggacagatattcttcccacctttggaggccccagggaggccccaggagcaaaggtcctggccctcgttcctggaacacaggtgagtttcaggttgtactctgtgactgtgtgcatttcctatgtcactattgccccttgaggatctcagccctggcagtgcatcaggatccctggagggggccgtctgcaccccagacctactgcaccagatcctccagggatggggcttagggatttacattttaccaagctcttcaggtggtttggcaacaaagccagcgttgaaaaccatagtctagatcagggttgcaaactcctgtctgtgggccaaatccagtccactgcacatttctggagtaaagttttattggaacacagttacactcaattggctgtgtattgtctctggcagcttttactccagagctgagtaattgagacagagactatgtgggctacgaaacctcaaatatcactatgtggccctttgcagaagtttgctgaccctggtctagatccgcggaaaggcccatatccaccttgttttgagaggactcagggccgagctcagggtttccagccagctttgtgcggagagaaggtggagctgccccctatttcaatccagcctctcacctgggcagcatgagaggcttctcccgggggcttctggccctgctgctgccagaagcaacccccttctcctccatggacacccactttccatgcttaggaagaaccctgcttcctccggggagtcatctctggcctctccagcccacagtgtctcttgtgctgccatccatggatctgaagacagacgggcccctctgtgtgccagggctggaggatgctggagatacaagtgtgcagaattgtggattaatggctctcagggctgccatggagaaatgcatgaagatgcaaggggaggaaggaggattctttcctcttggaggtgttggggccagaaagacttcagtaagggggtggcatggcctcagggaagggacttccaggaggagggggaggcatgcagaaagagggccgaggttagggtccctgtctgtcgtcccacccacggtcctcagggtgagtctccatgggcgctgccatcagccctgggccagtgcctggctggggtcttcccatcatgttgctagcagctcctctggctaaggtcaaggtacccgagggcaggagccttatttagcctgtctctgcctccttttaactgtgcgacatcctctctggacctctgtttttcttatctataaaatggtacaattcctctctaaggttgtgtttcttcagttgcaggattctatcagcttttctcctaagctccacatttcaactaaagtgtttttggctgttctctaggaaaacctgccccgttctcacgctgggcacccgttcacatggtcccctttgcaggagatgccctccccagttggactgctgagggctttaccactaccgtggcctcagtttctcgcctgcacgttgaggaggctggctggcccgcgtgagtccacaggcccttcccagaagcccccgcctctctgttcggtcccctgcagagtccctgcgatgacggaggaggtggcccgggaagccctcctcagctttgtggactctaagtgctgctacagcagcacggtggctggagacctcgtcatccaggagctgaagcggcagaccctctgcagggtgagaggccagggccggtggggggccttggccggggggctggggagctgggggctttgggacagtggaggcctgtttgtgtgatgtggccaggggaaaggagtcctgggggcagtgtgtttgagtgtgagcggtggtgatgttgaatcccatctgcaacttgacttgtctgtggctgtgagtgataataaaaagaacaagtgtcaggccgggtgcggcggctcatgcctgtaatcccagcactttgggaggccgaggtgggtggatcacctgaggtcaggatcacctgaggtgagtcaggttagaccagcctgactaacatggtgaaaccccatctgtactaaaaatacaaaaattagccgggcgtggtggtgggtgcctgtagttccagctactcgggaggctgaggcaggacaattgcttgaaactgggaggcggaggttgtggtgagctgagatggtgccattgcactccagcctgggcaacaagaacgaaactccaactcaaaaaaaaaaaaaaaaaaggcgtcatcaaacaccactgacaggcttgaacatgccaggcatcatagaacgcatgctacacacacgccttgtcaaatcctcatggctgccctatacggtagcatcactgtcactggtttacagacgagaaattggaaatttaaagaggcaaagtgattttcccaagaagatgcagctagaagtgacagaggtgagattcaaactcagatttggtagcctcaaagcctatgtcctcacttcatacttccacaaggcatgggctgagagaggttcatctacctgccactagacttcagctccctctgcctcccccagatcatgactgtgccaagaaattctttattcattgctgcagggaagtcctgcctctgacaggcacttctgtctcctgtattgacagagcagaggagcagcttttacagtcacattttctagtgctgctcatccagccaccctctgaggagcacataatcacttgcaggcagtggttagagcaggaatctgaaagaagaggccactgtgtggctgtgtgaccttgggcaagtcagctgacctctctgagcctccatttcctcacatgtaaaaggagagggcaagtgatgtccaagacctcttcccattctgtcaccctatggatgaagatcaagaaggaagatcttgatatcagggagataaattcctccataagggaaatctcaaagccatagattccagggacctccatctatcaaagacagctactgctctgaagcttgtctcatagaatctttgtataaattcatggggaactgaattagctctagtttgagcctgtcaggggagatttcctggggctggctgacttccctgcagacatgggggcacgtggaacagaaatcgctgttgtcagccagttccagcagccgagggtgttgtgcatggacctctcagtttccccactgagccctgggagggtaacagcttcatctttttgcataatgctctgtcttcataaggggcacgagtgtgaacatgctgtttttttccttttagtaccgtctggagacctttagtgaatccaggataagcgagtggacatttcaaccctttactagtaagtgaattgtctgaaattagtttaactgggggcaaataagtcagggtgctggtggaaaatatcaggacttggctcaggcactcatctcaaataagatggtcttctgcttggagccttggcttccttaccccctgcaaaatgagaggatggactttcatctcagagactttccagtgcttatcttaggaaatgcttcctgcccaggaagcaggaggtcctgaaaaagccaagcatttgcttttgctacagtctggtgctgccacacggggccgggctgtaaagcagcatgcgtgtctaagcattcacctacaccccctcatgccacccctaattcctcctaagcttctaggcccctgtgctccccattcgccttgccaccccaccttctgctgagcccccactggaggcctaagcttctctctttgggaagatctatgtcctccttgttttccctaacagaccgctcaggtccattcttcaagactcagctcacgtgtcacttcttttaagaagcttttcaggatttctcctcctgctgctcccctcccagcaggatgggccagtcttctgagttttcagagccctttatgcaactcttgtccaaagcatgtatcatatcctatcatatcttattgtgatggtgtgctgtctgtctccttgaacagagcaagaggaagaagatgggatggtgaaggggatggtgatgataatggtgacaattcttgtgtgtcatcccctcagtatgtgccattcctggtgctaacaattttatatacattcttccgtttaattttcactaccatcttgtatggtaggtgccatgactatccccattttagagatgagagaatggaagctcagagagggtaagaaacttctctaaagtcaaacagctaggacataaaagagccaggagtcaaacccagatctgtctctctctaaatcttggttgcttagtcactgcctccaaggaaggccttgactatccatccctgtagccccaggatctagactcatgcctggcaccaactgaaggcttcatgctgtttgctggataaatgaaagtttatccctgctgcccttcgtcattcttacaatgacccctttctgtgtcagaccactctgtggatgggccgcaaagaggcgcctcccccaggctctgggacatcaaggttcaaggtcctccgatgtttcaggaagacaccaggaagttccaggtccctcactcgtcactggtcaaggtaatacgattaacgcgattactggaatacttgcccttctccctgagaggctttccaggcactgcatgtttcctcaaactcatcctttgaagggaaacccaaaattcaggccggtgcttcatttgttggttataaataaacgtaatttaataaaacctggtatatggaatgtagtcccaaataaaattccaagcaaatctgggagtgttcacctagcaaacagatcatccgatttacaaatcgtcaccagctttagtgagcagtgacattcctggacaggttgagtgtagttttcatcttttttaaaaatttattttagcttaaacagctgaagggctgaatgaaattgatataaaataaaaacttaaaaccctgctgggattttgcatgagagtcagtaaggaaacagaatctgacttccatcctgctttatggacatatattcgtggcgtgaagggagaggagcctagtggattacaaaaacacgactgagatagctcatattgtgttcttttccggttactgcctgctttacacttttggactggatttaagggtgcaattttgctctatgagtttttacagagttctaagataaagagtactttgagaggtcgagaaagtgttctattcctttctcaagggggccaaggctattttaaattagtgattaaatactagtagctagctcattgcctttcataaaaatcctgtccattttttaatggcttctgttcccaaagaccacattagctaccttatgggcaaatgccatcagcctttgtagttcagcctggtaggaaaccgtagagtgtgagctaggatatggggctcccagaacacgtctccccttgatggcatccagattgggctagggctcagaggaaatggtgacatgatctcctgatgcagtcaagccttctggaatcttagtcaaatgggaagggccatttctttcctgtgccatcttcctatcctggtcctgatccactccaccttcggtttagatggtgatgttatgggtgtgggagaagtggcccttgggaaactagatcccaagaaagcgttgcactttcaggaatgccacaaatgccatgggcgtgggcggtacaagtgcagcggctgccacggggcgggcacggtgagtcatctgtgaaccactggtgagtcagtgagggtgtggtggccgggggatcctggggacagcgggctgggctggtggcctgaggctccctgcagtaactgtgtcatctcagccaagtcatcctccctttctgggcctccattttcccgtctataaaatgaaaaagtggggttgtgtggtctctaatgacactttcactttgacagttcgattttaatttttctcttattttctcatccatctaccaacatacactgaatacctgcttggctctgacctctaggtcctgtaagagggccaagacctggggttcttcttaccaggcagtctttgtcagccagggaaaccaacaagcaactccatttgtcgtgcagggcagtgggtgctgagcaggtaaagtttggaaggcttggagagacaaagtagacagtgacacttgagttagtttccttcggctgctgtaagccatgaccaccaatgggtggcttaaaacaacagacacagctgggcgtggtggctcacacttgtaatcccagcactttgggaggccaaggcgggcagatcacgaggtcaagagatcgagaccatctgggctaacacggtgaaaccccgtctctactaaaaaaaaatacaaaaaattagctgggcatggtggcgggcgcctgtagtcccagctactcaggaggctgaggcaggagacaggcgtgaacccaggaggcagagcttgcagtgagcggagaacgtgccactgcactcccgcctgggcgacagagcaagactccatctcaaaaaaacaaaaaacaaacaacagcaacaaaccagacacctattatatcacggttccggaggccagaattccaaaatcaaggtgtgggctaggctggttcttctggaggcactgagagggaagccatccccttcctctcccccagcttctgggagctgcgggccgtccttggtgttccttggcttgtgactgtgccacttcagtccccacctgccttgtcacccagccttctccctgcatgtctttttgtcttcacatgggcttctaataagaacacgtcatcggatttaggccctaccttgtcatatgacctcatcttaactaaatgcatttgcaaagactatctctaaatgaggtcccactctgggattccagtaaacttgaacttggaagggccgctattcaacccagcacaggcccctcagtggcattactcatggcattagttgtcttttcagaaaccttcattcaggcctattaacaatcccagggggtaaaaccaaacttctcgcgttctttggtgtcctgattcgagcctcatcctttggccatgctctgaccctggctaccgtgaactgtcttctccaccagccctttcatccctcgcctgctgggtttgcatccccagctcactcctgcactgcctgtgggtcccagcggtggtcttccctggaatgtttctggagcccaccatgagcccaactgggagcacagcctaggccttttctgggggccatttctcaaaaggagccccctgtctccagtgccaggcccctgaccagcgcctgtgtcccagcttcctctcaacacttggtaggggtcaggtctcaggggttgtggggatcagagaagaggcaggagaggctgatgtctcaaaagaaacagggatcttagggagtggaggctttgaaagctacaactggaaggatccaaagataccccatctccaccccgcaccattttacagatgaaggggctaaggcccagggggaggaaggtcaccaggctgggatttgaaccaggtcttgggatgccgttggccctgcttcctgggaggccagcgggggctgaggcagtggtgtgtctgcaggtgcggtgcccatcctgctgcggagccaagcgcaaagccaagcagtcccggagatgtcagctgtgcgcggggtccggcaggcgaaggtaggggcatctccccagcaccgcggtgaagtgctcttgctttctggcttttcattgcctgcccatctggaaggcaaacaggaacccatctgtctcgtcactgctgtgtccccagagctctgcacgtagtaggtgctctgtggttatttgaagagtaggtgagcttttctcaaggcctggcatttctggacaaggctggaactcgtcatgcaatatatgtggaaagagtgtgaagaaagagccactgcagggaggaaacacagggacggggttaccaggaaaggagacctctcccgcccacgggttgggaagtgaatatcaaaaaccacctaaaggccagatttttaactcactgaggatcagttcctgggcaagcccctatttataactcattttggggtctgaatggaggaggagtcaaggaaagttggttgattgactaaacaataaacaaaatttcatcactgctcacagctttgcaaacactgggccattgcattttgtaaatcctatcctttagtgtatttataactttttaagggaaacaggaaaccgtgaggagtaaaaatactcaaggttgggttggttaatgatacttttgcctcattaaagcccaggccatccttctgacaagccagttggagaagctttggtggcaccttccatcgtggttggtagagacagtctctgactgggaaaaagacacttatttttctttcatttgcaagtgaaaggaatccaattcaaattggctttggcaaaaaaagtcgatttacaggcctaggtaagaatgaagtccaggggtatatttcagggatggcttcaggcccagctggatccgggtgcttaaacaacaccaccaggaatctgtatccacctctcactctgctttcctttgtgtgggcttcatttgcaggcagggggttccttgtagtggcagaggagatcaccagtagctccaagcttactaatcccaggagaaaagatgtccctttcccgatagtcccgacaaacatcctgggacagatctcattgcactcgcctgggtcatgtgcccatctttgtatcagccactgagaccagggacatggaataagatgattggccagtcccagatcccaagctgttcacagaatttagtggtgggggaggggggggggcaggccctagagccatgtgggctgggtgggggaagggtgatccccatagagatattggggcactgccagcagaaggaggactaggtggtgggcaggtacaaacaatgcaggcccaccacagtctacctccaggaggaagggggtgcaggtgggagcctctggaagccaccaggacctgcaactgatctgggggtacggactctgtgcctttctcagatgcagcacttgctcagggagagggaacaagacctgcgccacctgcaagggggagaagaagctgttgcacttcatccagcttgtcatcatgtggtatgtggcagtgtctcaatgctgtggcatgcgggggtggctgagggacttagccctggactggcttctgcagagaaactgtggttggttggggctttcacagtgcaagaacctgccaggacttagaagggggagaattcccttggaagaggcagtgtggggttgtgggatgctgactggctttagaacagacagacctcagtccaaattctgccatcaccactttctagggcagcagccgctccacaactgagcccttcccgtaggaatagagccatagcatcctgctacgtccctaagtcagtcagggcttccgtgcattaaaggtttctcctgtctcaggcaccttgctaagtgctttgtaggcaaagatgaaatgaggtaatggagctgaactgtcactctccttactagcttcattttacaggtgaggagactgaggctcagagaggctacagaactgttgcaaggtccctccagtagcaattcaagccctcaaccccaggtctgtctgattgcaaaggccatgcttttaacctgccacactgtgtgctttcatccctcatcctccttccctccaggaagaacagcttgtttgagtttgtgtctgagcaccggctcaactgccccagggagctccttgctaaagccaaaggagaaaacctctttaaggatgaaaactcggtggtaagagggcattgtagatgggaacaaaggaagctgggttcctcctctgctctcgtgggcctggggctgctagctgtgtgtgcaggctgcattccttggaaggacaggttgtgtaggagcagagctccccagacatggataaggctgtggggagcctgggggctgtcagtttccttttgacttttacacactcagccctctgtccttccccacccaccatgccgttcttccttcctaatactctctttctctctttccctccctcccttcttcctcgctcttttccttccttcctcatcccctccttccctttcttcctcatcccctccttccttccacaaatcttgagaccctcctcctatatcaggcactattcttggccctgggtagaccatggcaaataaaacaaggaccctgccctcatagagcttacagtctggtgaggggactatgatggacccttttatagcaatgtcagatggtgaaggggcactgagaaacattcaagcagggtaaggggcagggaggggtggcagtgtcgttccagctggaggtgggaaagcctctttgtggaagtgaccttgggcacagacctggatgcagggcaattggggagtggaccttgtggcgtgggagcgaggggacagtggggcagaggccttgaggactggcagagggcagtgagcagggcagagctaggagctcagaagtgagaggtaccttcagccagaggagagggtcctgcgggccaggagttggcacacccagcccactgcctgcctttgtcgataaagctttattggaacacagccccacgcattttctgacaggttgtctatggccgctttcctgatggtgggacagagctggataatgacagactacatagtctgaaagcctgaagtatttactatttggttcttagcagaaaaggttttctcactctgccgttggccttggcagagagattggcttcaatgggacttctgatgggggtcctcaaactatagggaggtgtgtcagcctcctttctttgctccagtaatttggctttttaaaggctcacctcaggcatccccccaccagaagccctgcaccccactcttccatttgagttagggatttccccctgggctcagctcagactgaggaccatccctaggcgtcactggctgctggcagctctgtgagctgaccctgcctggtgctgagctctgaccaccgtctcaccctcagcgtccacagcagcactgggcccaggtggacacttaggaggagggtggaggaaggagccacagttccacaatgaggggcagaacagggagccccaggggagggctatgcttgcccttaatatgtggaaggctttcaagcctggcagaaggggatctgggggctttggggaccgaggagatgccccagtgcccggactttctgtaggttgagtgcaagcgcctgggcttatttgtggttcattttgtatcctcagctcacagacagtgcctgacccttagagggcggtttgaatgtgtacatgagaaatgaatctgagttcctttcccgctacacgtgtacagaccccacgagtccacactgacggggaccacaccagccatggtcactgccttgtcctgcacctagcgcggtgcccggcacacaggaggcacgcagctggggtatccagtgggctgcaggtgatagcgttctctctctgactgcaggccccctgttttcctgtttttgaaattcctgagaccacaccgtgggtccctctctcagcccccttctctgtctggctctggctctggctctagtcagccccagtgacttccaaggctccaggtgcggcagccaggtggtctgtgtctctctctctttcccccaggtgtaccccatcgtggacttccctctgcgagacatctctcttgcctcccagaggggcattgcagagcacagcgctgccttggcctcccgtgcccgcgtcctgcagcaggtgagccagggcggaggggccatctggctctgacgtctcttcctgggctgctgagccctctttcctgagaacgtcggagcggaaggatgaggacgtagaggtgagggaggtcccgggggaggagtgtgggaaggggtagggcctgacctaaggccccagggcatggagcagggcaagtaagacgcagaggcaggaaggaccgtgggtcgcaggagaagtttgcatttttattcccagaagcgattgcagggttttaagcacgaatgtggtgtcatgggatttttgattctgactccctggtgttcagataggggaagaaaaaggtggggattgaacgtcacaggcctggctggagcccagtgtcttgcccctgaggcccctggcacttcccaacccccagccctgtcttctcctggcctctgtggttttggccgctgtatcctgatggccacaaggtggcggtggtggctgctacatccccaggagcagccctgagtagccccttctgctgctgctgcagccagccaggggaccctaacgtgggaggttggcctgataatgtgctttgctggagctgcatgaagtgggacagcagccgggacaggaaccttgcagactgggctgagatcctgcgtttcctgcatcccaacatgatcctgggccagccacttccctccttcaaagccagtctctcacctgcgaaaaaagacactaaagcacctcagagggttttgcagcaaaaccctcgaaatgtgtttggcacccggtgctcaaaatgtccctttctgtcctttgcaatgggcatttccccttctctgtctctgtctgcacatctccctgatttgtaggagagagaagatgcatttttatctacatgaatacggatcatcttggagctggaagggggctgagaaatcatgcagttcaggcactgcaaacttacatgcctaccagggccaggcagtaaggagggtgacagagcgtcattcaaaggggcctgtcgacactcagctttctgtaggcacaagacccagtgtttccagactgtctgaagtccagatttttagatgaaaacttgtagtttttcaatattttggcagctgggaaaactgaggcccaaggaggggaagttacctgtcctaagtcacacagtttgttggtggcaggtccaggactagaactcaggtctcctgaggccctgcctctgccaatacagccattccgggagccaggaagggtaaaccagggggcaaatacacatttttctttaaaaaggagtataatgggagtggaggtcacttctctgaatcttttttctaattttgcctttggtcctagagctgtaacaaagattcatgctaatattttactcaagatggagaagttagagccgaaatccagccatgaggacatagctggctaaattccatctcccagccatggccatgactctgagacctggaatctgcttattgcaggggctcagctgcacagacagataaacagccaattacgtgatgaccacttgatggcaattgatgtcttgagcaatttgtggcctcaaacttcgagactttttgagccagaagcagatagaggcagggggattgcgggggttgtgggggggctggtattgccatgctctccattggatcttaatagaaaaatctggaaacaagagtggtcctgacttcagtgtccaggccttctgagcactgacattgactcccatctccttgtgccctttagtccctatttggggtcctttgcactgaaatttcaagaggcatcttccaacttttatttccgaaattgtcatttggattccagtttctggcatatgaagaaaactcagtcaccggggtcttatctggttgtctcaacaactctgtgaaataagagtttttattcccatttcacagatgaggaaactgaggtctagagaactggagcacaagatcacatggaaagctgtgtggaaattttgtgccctgactctgattcccctcttccttctgcaatgtcatgctgccccctggcctctcctctgacagaacaggggcctgcctctcaaaatacacccccactgcccagatctccagggatggccagggcagtttttctgaaatggagagagaagtcgaagcagccagatggcttcagcctcagccccccacccggcctggtttacctcttccctagggtcttcaagctatcaactacagcaagaggacttggggttcttttcccaacaggaagaattccctgcaagtaaagagggcctgaccctgggccaatcatgccacctgtccctgggtttgggtccccacatctgagtctgggacaggggaacatcttgtgcagaagaacttaggggtttttgcacagagcccggcccacaggaagtccacaagaaagcttggcttagatgatcaggagcaacattcttatgtcaactacgaagtgtagttgccagtaacaaaacagcaccagaagccagtacagatgggagcctaatgtttgctcccaaggtgggctgctgttttctgttcagggcctcatattgcagaaagttattgagtaactgctcagagaaggggctggagaatgagggacttagcatctccctgtgggagggaatgaggtccccatcctgaaaatagcctggcacagccaactaagctttcaaatgtcttcggggtcaatgttttatcttaaaatttgattcaaatgttagaaaccgcttcctaatacctctgtggttgttttaatacacacatgtttaaaccgactttatcctccactgccccccagcactccatctaaaaattaatgcttctggaagttgtcctacttggttggtgactttccgtacaccctggaactcccctggggatgcctgtgcccacttggtgaaacctagaatcaaatggtagctaaagatgagaagtcggttttggccagagcttagggtgcgtgaaggagcacagtaggagatacatctagaaaggcagattgaaggcagattgtagcagggtttagaatgctgtgttagtctgttctcatgctgctaatgaagacatatctgagactgggtaatttatacaggaaagagttttcatggactcacagttcccatggctggggagccctcacaatcatggcgggaggcagaggaatggcaaaggcacatcttacatggcagcaggcaaggcaagaagagagcatgtgcaggagaactgccttttataaaaccatcagatctcgtgagacttactcactatcatgagaatggtatgggaaaaacccacccccacgattcaattacctccctctaggtcctcttatgtcacatgaagattattataattcaaggtgagatttgggtgggaacacagagccaaaccatattgaatgccaactccagagcaggacctttcataccacacacagtagggagctactgaaagttcctgagcaggtgagtgacttgaacagaacactgacattttccttggctatttgtttcctcagcgccagaccattgagctgatccccctcacagaagttcactattggtaccaaggaaagacttatgtctactacatctatggcactgaccaccaggtgtatgcggtggactatcctgagcggtattgctgtggctgtaccatcgtgtgacatagcatggctgtccccagagcctgccattcacgtttgccaaggaagatggccgacactctctgagtgtgttcactgttggctgcattggacaatcacatacaaaccctggcatgtccttccagaaaaaccagcttatcatctatcaagctccaaccccttatacagctcctctggtggaatccatgactcatatgtttaacctacaataattcagctatacacattcctgtagaacaaatgagagaaataatttaaatggcaaggactttgcctctggtctccaagttaatgccccgatgatgcgtgtgatttgattttgctttttccctttgtcggtcttggttctggtgtgcttcttctagtgggagcctcttgacgatctgagtattactgaaatgttcaaggatacacacaaatatctggccctaatgcacaataaatactgcacttaggcataaagtgcaatatgttactgcccattctgtggatcaggaattcagacacagccacagtgcggatgatttatctctgctctgtcatgtctggggcctcacctggaagatttgaagcctggagctgctcaagggtggggcctgaaatcatctgaaagctggttcactcagatatttggtggttgatggtggctggtggttgggacccctttagggaagctgtcaggtggagcacatatatgtggcctctccacgcagcaagagcttcctcacaagatggcagctctgagagtgtgtgcccctcatgcacgtcccaattgaagaaatagagatctgtttcacagctggagaacaaaccagctgtgttggatggaccaagggtctgcatgccaatctctagtgtggtgtctatgtaaggaatttagagagtgttttcgaatagttacagttttttacatcacgggctgaccttagagcctgcccactgaataagatgtgaacttgatgctctgtgcacccatcacaggcaggagctcccacctggtggtataaggctgggtggggggtggtgctggaggggatgctctgcagtccttttgccgagtcagctttg

SEQ ID NO: 10 - DNA, 17189 bp, Homo sapiens
tacaggcgtgaaccactgtgcctggccttcatctatattattaccaggaggcagatgtgttctctttttctctgaggtttagaattatgcaaatgaagatatgaaaacaaaagctcagtgaggtggggaggattacacttaagaatacaggtaattttcaaagctctttaagacacccctctcagtttttactaacagctctctcttggctctttgccagtctgtttagaatttggcacctcttcataacctttcaaccaaagacctgtaagttcattctaaagctcctatcctggcctcattttgcaagtggagaaatcaaggcataaaatatgagctttcagtgtctgtgggctgaccttgagtcttgacctttatcctgttctatcttccctccgccgaaaactctgaccctattcctcccaggttcccccttcatgatattatctggagggcaataggacctagggaggttccaccctgcggcggagggagacacacctgcctaacagcgtgggtagagtgagtgttgaagcaagtcacttaactagttagggagggcggggtagaagtgggggcctgctgctcctagggaggagtaaagctgtggctcctgcctgggtctggaggtggtggtcagaagtgcttctgaagagcggcccaagcccctttttgtcccgccactccacaacgagcatccctcggctggccgcctgcccgggaactctccggctggttttgtttggccgcagccgtcccgcccatctcgcccgcccccgccgtcccggtgccttagtttttgaagctgccgacctctcgcagctggaatcgcagaccaggcaggaccctggcagcagacggcgtccaagagtttggcgacctccgtccagccaggttggcgccccgcacatcgtgcctctcactagcaaagtttctccgaggagaagcagcccctccagccttttcttcatcctgtagagcgagcgcgctctgcttctgtccctcaacactgcattcggagacagggtggtgacaatactccactcccgggccaggcggtcttgggggcggggcttgggggaatccgaggagctatcctgagaaccctggactcggcaaaggtcctgagagcgcgcaggtgagcgggccagctgatagctacagcctagcaatagctaggatacctaggcactgaactgaatcccctcttctgccctccttcttctgcgcccgctcttctgccctggctcagctctccgctgacttgagaggacacactggtcaggactctttgtgaggagctgctgagtgtcggtgcccccgacagatcggctacaccctgcctgaggggctgcgaaaggagccgccacggaagccgctgttctcatgactcttcacgtccctggagttggactctggatggggcgctgggatgcttgcttttgtcttgttcaagtttcacagcaagtatgttgacgattggaatcggggccaatcaagagtcaagttcaaagtggtactcctgggctttccatcccagactccaagtcgaatctgagtctagaagagagcggtttcttgctctaactagtgaatctctgttcccaaactggacttgacagagctctcctcacctatacttggactgtagcggccatagggttctcttggggatgggtgggagggtgctatgaacacaagaccacaacattcagaaagaacctcgacaatggacagagtttatgaaattcctgaggagccaaatgtggatccggtttcatctctggaggaagatgtcatccgtggagccaacccccgatttacttttccatttagcatccttttctccacctttttgtactgtggggaggctgcatctgctttgtacatggttagaatctatcgaaagaatagtgaaacttactggatgacatacaccttttctttctttatgttttcatccattatggtccagttgaccctcatttttgtccacagagatctagccaaagataaaccgctatcattatttatgcatctaatcctcttgggacctgttatcaggtgagcaacttttaaatcttttccttacccccctaaccccaccccagacttgggcagagaaagatgaaagatttacaagatggatactatggctctaatcaattctctcatttcctcccactctcggcttccctgtctaccattcagaaaacttacctgaaatcttaaatgccaccatgatgaacatgtggtatgtacttgtgttccaaaacaatgaacgatgctatttggcctgtgtaaactagaatgggaacaacaagacgtgatcaccctgtgcatgaaggccatagctgcagagtgtgtaattttatttaaaaaattttttttttctgagacaaggtcttgctctgcctcccaggctacagtgcagtggtgcgatcatggctcactgcagccttgatctcctgggatcaagcgaacctcccacctcagcctccaagtagctgggaccaaaggaatgtgtcaccatgcctggttaattaaaaaaaaatttttataggccgggtgtggtggctcatgcctgtaatcccagcactttgggaggctgaggcgggtggatcacctgaggtcaggagttcaagaccagctggccaacatggtgaaacccctgtctctactaaaaatcagctgggtgtggtggcgcatatctgtaatcccagctactctggtggctgaggcaggagaatcacttgaacccggaaggtagaggttgcagtgagccaagatcggtgccactgcactccagcctgggcgatagagtgagactccatctcaaaaaaaaaaaaattttttttgtagagacgggatctcgttatgtagactgggctcaagtgatcttcctgcctcagcctcccaaagtgagccaccgcgcctggtctgagtgtgtaattttgactctaccttttggatgctttgtaaattggataaaagtttctttaccctgagctgcttgggctggtgctactgccattttcaaattttccagagtaatgtgacatctggaaactattttaaaccatctgtggtaatctgtaccccaacccaatatagttcagttctctgtcggtttatcagtttcctatttatctctttgtatatttctgcaataaagatacgaagttgggagggggcaaaggaaggcagttcatctctctatgtggatgcagtagcacaatttaatagtatcaagtatttccattcagattgccttgaagtggaaagaatgcacttaatcctagcgagataggcacctgtgtcaacagtctcatctggatgctatggggttttcaaggtagagagatgttgcaaaacttatgagttcaggagtaaggaatggaccaagtttgtcttgattgcaagagaggcagacaactgcagtcagccgaggaatatgggtcagagtgttgcaatgggaagatacctcatcattagacaactaaaaagtctgtgaaactaattaaggatggaactcactcctttataaaatttcatatctgtacacatgtataatttttatttgtcacttatacctcaataaggccaaaaaaattttttatcaataaatttttaagtggggaggaatcgattaggctctatcagagagaatatgggatatcaatggaaacagtggcctgaaatttggagtctagtcttccccctgtcattgactggttgtgtgttcttggtaaaatctctgaagatggcttcacaggaaggcatatagagttccctcatctgtaaagcaaatgggttagtctaaatcatgggtctcaaactcaaacacttgcagggaccaggcaggtatcataaatgaatgaagcaggcctagtataagaaaaaacagtagccttgtgtgagatgataaatgaaaacaaagtctcagagaaatactgaggagtagtgagtaccatggtaatctgaaatcttcatgacctgcctgaaggaggtagcccctctagagccctggcgcattgtttccatgttggaattcagacccagtattgccagatccactaacttttcgggagatgctcccaagacaggatttttatatgaaatgtcatgattttaaattttcacagctgactaaaacaataacaacaacaacacaggatggaccaaaccatatctgttggtcagatataactcagctggcctatatgcatctttggactgggtgatgtaaaggtcctttacggttctaaatctttgaagttaagctgtaaaaggaagacctcatcttgaccttgaaaccaagaaatttaaagttgtgactacaggagcaaataaaccattcatccctcctttttcaaatacaatatattgagttaaccaatcgaaaactctcaagatacaaatttcagaaagtacccagctgcaccctcccctctttttgacttcctttgtttgctttgtgaaccctctgtgtagagtgttgagtactgtttttcatttttgttgtttagcttccactagaaatgattgggaagcatttataacctcaggcagcttagcccacagcagagaaaagataaaaactcataaattatactctggattcgcttattttcaaggccaattacttgttagataggtaggaacttgattagtgttatcaggcacatgaaggtgcttgtagagtctgggtgccttacatgaaatgcaagcatacttccgaaatgaaaatgtactctaatttattgaagcttataaatggacaaacacccttacttaaaccagaaaatagccctgagaatagaaacagaacatttatgtaaatgtaaacggaacatttcatgccaccaccttctccaatactgttctccaatttagcaatagtactgatgggttggggttaaaatctaaaatttttcattgaaaatgcacttatgcagaacaagaataggaaaaaagtgttgctttttcttctctgttctttctttgcatctttttctttcccaggtcttagagtttgtccctagaaggtgacaatttcaaactacatgcttcagagtggtacacatgcatcagtcttagggtgatctatggagactggcagccagcatatgttccaaattttcctatcaggaactaaaggctagagagcatatcaacctctgggcttgtctttggtctacttttctgttaaatttcattgctgttattattatcctctcctcccataattgcttaccctgtattattttcttccttcttattctttcatttactcagcaaatatttctcaaatacctactaagtgataagagctgtaaacaagataaatacaacccttgacctcagtctcttgggcaagacgtgttaatgtccactacaaatgttcttactagtcataagtagtccacagtttttattcattaaaggtgagtggcgaagtggtaactcaggtgttccagaacaagatgttctagttgcttctcttccacttaccacatcagaactgctaaagacttctgatttgtatgggggaggtgggaggggcagagcaggaaatgtcatcttacccttattccaaggatgataggctttcataaggatgtttttctcttcgtaaagaaagaatccagtttaaaaggcttttgtccacaaacaggacaagaggcacaaaaagtaactattacagtgatctttcgagggcctagttatgtagttcattcaggtttgagttgtcgtcttttaagtacttttgttgctttgatggcttcctgtgtatatgagatattttttttcctctgatctgtcccaagactttttggctgagatatggttgtgagccctttcttgaaaaagcagaatctggccaggcgcagtggctcatgcctgtaatctcagcactttgggaagctgaggtgggtggatcacctgaggtcaggagttcaagaccagcctggccaacatggtgaaaacccgtctctactaaaaatacaaaaaaaaaaaaaaaaaaccttagccggacatggtggcacatgcctgtaatcccagctactcaggaggctgaggcaggagaatcgcttgaacccaggaggcagaggttacagtgagctgagatcgcgccagtgcactccagcctgggcgacagagcaagactctgtctcaaaaaaaaaaaaaaaaagaaagaaagaaaaagaaaaagcagaatctaaaactttggttatggagctgaatgctttgagggaggaatgctttacctcacgaatttgaggtaagaaaacagggcctttggaaccttcattattttgctaggaaaacagtatcgacttaatacctttgtgttcaaggcacttttctacctgccacaggcctattcttaaaaagacaaaacaattcctcgagtcctcaaacaagtacttctgaaacagtgttcttaggtcagtcgatgactgaacaaaaatggatttagattcatgtaacttgtagaaggcatgatccaccctttgacttatgagaaatgatcagaacagaagagagaaaaagacaaaaagtagtgcaggctggccatggtgtctcacacgtgtgatcccagcactttaggatcccagcactttgggtcaaggcagtaggattgcttgagcccaggagtttgagaccagtctgggcaacatgtctagatctcctctctacacaaattaaaaatagctggcatggtggcatgcgcctgtagtcctagctactcagaaggctgaggtgggaggatcatttgagcctaggaggtcaaagctgcaatgaattatgattgtgccactgcactccagccagggtgatggagtaagaccttgtctcaaaaataaaataaagtagcacaacctccccaagttatttttttccctcactacaacctcccttcccaggacagcttagttaagtttgcatgatgctttacttctgcagatgtttggaggccatgattaagtacctcacactgtggaagaaagaggagcaggaggagccctatgtcagcctcacccgaaagaagatgctaatagatggcgaggaggtgctgatagaatgggaggtgggccactccatccggaccctggctatgcaccgcaatgcctacaaacgtatgtcacagatccaagccttcctgggctcagtgccccagctgacctatcagctctatgtgagcctgatctctgcagaggttcccctgggtagaggtgagtggggtcaggagaggggagggctccagttaaatcaagggtcttagaagtctagacccaagctgtctaataaactggccactagcttcatgtggctatttaacttaaaattaaataaaattaaaaacttgttcattaatactagctacatttcaagttctcagcagccgtgtgttgctagcaactactgtattggatggcacaggtataaacatttccatcatcacagaaagttctatcggacagcactgggagatagttaaataacttgtggagtcagacatctcaagcctgccagatttcttaaacaggtaagctgtttagactaaaaatgtcacagataaaccttctctgggcccagaagaagctagtaataccagcagtcagtaggatattttcccttgcccaaaatgtttaaattatgctgttgttttgtttgtttaaggatggcagtctttaataagaggttcccaaatagtactgatcatcagaatcatgtgatgagcttctttttgaaattatattcactccccagacttgaatcaatcttaatatgtatttctaaaaggtacccagttgattttgatcagccacatttgggaaccaatgatttaatcatttctgctaatgccagtggagagaaagaaaaggagcgtgggctgggcacggtggttcaagcctgtaatcccagcactttgggaggccaaggcgggtggatcacaaggtcaggagattgagaccatcctggctaacatgatgaaaacccgtctgtactaaaaatacaaaaaattagccgggcgtggtggcaggcgcctgtagtcctagctactcgggaggctgaggcaggagaatggcgtgaacctgggaggcggagcttgcagtgagccgagatcgcgtcactgcactccagcctgggtgacagagcaagactccgtctcaaaaaaaaaaaaaaaaaaaaaaaaaaagcgtggggttaatactaatgagagtcaggcctggaccaagttctgaccttcactgtgatctttggaggaagttacaaagcaatcactgacctaatttcccacttgtagaagagggatcctgaaatgagtaagacctctagcagaagatgaaatgtgagtcagtgttttcaaagttgagataaattgttgttaatgaattttaacagcctgagatttgcttcatctgcttgggcaggcactggtataggtgtgggtacaggtttggaccatttcctattagattctaaccctgtttggcaaagtcccatgtctcaaataaggtaaggagaaaatttgccctcttttgtcttttttccccactcagaattgttcttgaagttctgttggtcttgaagcttttcacatacatagtagtttgaggagaaaactctttggaaatgatgatgcttttcctttaaatcatctaataaaaataggtgtacattacggctgggcatgatggctcacgcctgtaatcctaacactttgggaggccaagacaggcggatcacttgaagttgggagttcaaaaccagcctggccaacatgttgaaaccccatctctactaaaaacacaaaaaaaatcaaggatgggcatggtggctgatacctgtaatcccagcactttgggaagccgaggcaggtggatcacctgaggtcaggaggttgagaccagcctggcctggcgaaactctgtctctactaaaaatacaaaaattagccgggtatggtggtggatgcttataatcccagctacttgggaggctgatgcatgagaatcacttgaacctgggagccgagatctcaccgttgcactccagcctgggcaacagagcgagactctgtctcaaaaaaaaattcagccaggcgtggtggtgggtgcctgtaatcccagctacttgggaggctgaagcaggagaattgcttgaacctgggaggtggaggttgcagtgagctgagactgcaccactgcaccccagcctgggcgacagagggagactcccgtctcataaataaataaataaataacaaaagtaatacatgcacaaaatgacatataagtaattgtatttgcacagaaaatttctggaaactatgcaagaaactacctctgcggagtgggaatgaaaagtcagcagtcttactttttaaaattcttctgtatggtttgaaaattttttttgtgatcatgcattactagttttggtctttatctttttttaattacaaaagtcagacatggttatagtaaaaattaaaaaccatacagaatagatataaaataggaaacgtaatctcactccccaaagataacctctgttaatcatccagtatatatccttctggacttatttttactatgtaaacataaacatacatacaatatatattgtacatgtttttgccccaaaatggactgtatgaaacattctgtcaacaaagtatttttcaaaagtacagtatgccagtatgtcttttctcaagttatttatatatacatgtataacaataataaatatataatatacatttcctttatatgaattagactttttattctcctaattttctattgataggattctattgattgtctcaaaaaggaaaaaaaaaggtagcacaacctcccctagttattttttcccctcattacaacctcccttctcaggacagctttagttaagttcccatgatgctttacttctgcagatgtttggaggccatgagtaaggacttcacactgtggaagaaagaggggcagcaggagccctatgtcagcctcacaaattttaatttttcacaaaaaagttgtttcctaattgcaaattatgccacagtaaacatctttataaatacctgtgtacatgaatgagactttgtaggataaatttatagcagtagaattgctgggtggaaggatatgtatgtttaaaattttattgatattgccaaataactcttccaaaaagatatatgaatttatactctcaccaacagtatacaaatgtgcctgtttctgtttcttcatatcttaaactcaatattctttatttgtataattataaaataattggcttttaaaataattgacttttaaaataattcgctttctttggttatgaatgaagctgagcatctttttgtgtttggtcattgtgtgttctgtgaattgcttgtttatatattttactcgctttttctagtgggttgtctttttcatattaatttttaggagctatttacttattcttgttattaatcctttctctgctgtgaatatgtatgcatatatttgtataattttttgcttgtacatacacacattttaaatatgtatatacatgtcatacgtgtaatatgtgtgtgatatatttaatatccacaatacactttgtagtatcttctggcattctgaagtattacatttttatgtattcaaattctttattgcttttagattttgtgcctttcttacaaaggcctatcacatctctcatctggtagaacaattttccccaatcttttaagtagattaattttcaagataattttttaattcatcctacaaaaaacaaagcaaaataataacagcaaaagaaaaaaacatttcattgagattccgattgagatttgcatcaaattacttaggttattttgggagaatttacatctttataggattgttggatttcatattgtgaaatgataaatctctccattttattaaatattttaacatgtacctcagtaaaattgtatagttttcttcagtaaagttgtatagttttcttgctatgagtcttacatttttataaggcttactttcagatgttctatcagttttaaaatgacctgattttctaagtagcaggatagtatccaggtaaagtaaacccacctaccatacttttggaaatagggggatgatgaagatgacaaagaataggaagaaagaggaggagggggaggaggagaaaaaggaaaggaagaagggaagaaggaagaagaagaaagaagaacacagctaaaagaatttactaggttctaggcatttctctaagccctttacatgtaaatgtttatttaatctttaccacaaccctatgagataattatcattctcattttacagacgaagaaacagacgcactgagagtttaagtatattcccccaaggtcccataagcaaagattggattggaattcagggtgtttgcctccagagcctgtgtattttgttctcttatggcatgagtgtatttgtagggacacagattgaaaatgttttgacatttattggaagcatcaggtttttttccttctgttacactactaatcaataaatgagttctaatgtaagggaaagcatcgccacacagctggatgtatgctctcacattcccagttacataaggtgcatcagctcttgaggatgggactgagaatggttgagaaagacaagagtcaccacttcaagagtctccaattccagtctctgagattccaacactctacttaaaactgaagaactcagagctgtgcttccttttgggtttacatgggggaaatcttaacttttcctccactaaaagtaaaagattaagttgacatctctatggccaccttttccctacatcaagtgttttaataggaacagaaaactccagctttccttttggatgagtattcctcagccatcccacttctcttgagagcactggatttttcttagtaatcagcatcctttgacataaaggaagaaaaggaaagggccacctgtgtcatctatagttgaggcttaggtaggttagggagcatcctggctctttagggccactactctaacatatggttccatggatgtcatgggtgaggcaacagggtttggaaatttttgaactactctgctgcaaactcagagattcctaacatatgggggtaatgaattgacattgctgatgacaaatataagcaactcttgagtatctcagtgaattgagaactgaggtacatagatattcagtgacttccaaaagttcccatacagctgaaccaaggatttctttctttctttctttctttctttctttctttctttctttctttcttttctttctttctttctttctttctttctttctttctttcttctttctttctctttctttctctctttttccttttctttttctttcttttctttctctctttctttctctctctctctttctgtcttcctcccttcctccctttctctctttctccctttctttcttcccttcctccttacaggcatgcaccaccatgcccagctaatttttgtatttttagtagagaccgggtttcaccatgttggtcaggctggtcttgaactcctgacctcaggtgatccacccacctcagccccgcaaagtgcttgggattacaggtgtgagccaccgtgtgcacggctggaaccaaggatttctaattagttttattttttattttttttctttttgagaaggagtctcactctgtcacccaggctggagtgcagtggggcaatctcaactcactgcaacctctgcctcgtgggttcaagtgattctcgtgcctcagcctcctgagcagctgggattacaggcatgccatcatgcctggctaatttttttttctttctttttgagacagagtctcactctgttgcccaggctggatcgcagtggtgcaatcacggcccactattacctctgcctcccaggttcaagtaattctcctgcctcagcatcccaggtagctgggaatacaggtgcacgccaccacgcctgactaatatttgtatttttagcggagatggggtttcatcatgttggccaggctggtctcgaactcctgacctcaggtgatccatccgccttggcctcccaatgtgctgggattacaggcatgagtcaccgcgcccagcctaattaggtattttatgcacctctctaatctcagaagtcttcattaattccacaaacatttattgagcacctgctatgttccaggtaatatgttaggctatgggaatacagcagtgaagaaaacatggtccctcctgccttcatggaattttcaatacacattttgacacatcactgaagctaagtgttctagaaacacacaaacaatgttagttccttgaagaagatatacatcaaagaagggacttctattagcaagagcgttctctatgagtctcctaagactggattttttcagatagagttctttccgccttattcaatgtttgctccgaagcctgcttcatcagcaaagtctgcctgatacctttatatgtactcttctcacgttagtgacttctcaatgttctaagacccatgctttttaaggaagtttattttgtatatttatatgattattaaagtgttacagtatatgttcatcatgagaaatttagaaaatagagaaatgtagagaaaaagatttctaaaactgatataagactatcacacacaaaaaaagatattttggttcattttttcaattttttgtgcatctattttgttttattgtatatattcaaggtgtacaatgtgatgtttcgatgtatgtacacattgtgaaatgattaccacaaccaaactaattaacacattcatcacctcacatagttatcatttttgtacgtgtgtgtgtgtgtgtgtgtgtgtgtgtgtgtggtaaaacttaagatctactctctttaaaaatttcaagtacacaatacattattgtcaactatagtcatcatgttgtacattagagctctgaaacttatttatcttataactctaaatttgtagcctttgatcaaaatccttctatttccctaaatccccatcccctggtaaccacccattctactctgttgctaggtgttcaacttttttagattccacatataagtaagacaatgcagtatttttctttatgtgtctagctcatttcacttagcataatgtcctctaggttcatctgtgttgtcacggatggcagagtttctgtaattttatggttgaataatattcatacacacacacacacacacgcacacacacacacacacacagacacacccaccagattttctttatccattcatctgtcaacagatactgagtttgtttccatatcttggctattgagaataatactacaatgagcatgagagtgcagatatctctttgagatactgatttcctttaggtatacacccagcagtgggattatttgatcgtttggccgttctgtttgtaatttttttggagaacctccatgctgttttccataatggctgtgtcagtttatgttcccacaaacagtgtacaaggtcctttttcttacatccccaccaacactttttttttttaataatagccattctaacaggtgtgaggtgatatctcattgtggctttgatttgcatttttgtgatgattagtgatgttgaacaccttttcatatacctgttggccgtttgtataccgccttcggagaaagtctattcaagtgcatgctatttgtttacatagctgtgatcatatttgcatttgctcttaactggagctctcaagtctcacccgtcatctctctggacctctgggttataagtacagccttcattaccaacattgactgattgcctgtttttgtttttgtttttgtttttaacagttgtgctaatggtattttccctggtatctgtcacctatggggccaccctttgcaatatgttggctatccagatcaagtacgatgactacaagattcgccttgggccactagaagtcctctgcatcaccatctggcggacattggagatcacttcccgcctcctgattctggtgctcttctcagccactttgaaattgaaggctgtgcccttcctagtgctcaacttcctgatcatcctctttgagccctggattaagttctggagaagtggtgcccagatgcccaataacattgagaaaaacttcagccgggtcggcactctggtggtcctgatttcagtcaccatcctctatgctggcatcaacttctcttgctggtcagctttgcagttgaggttggcagacagagatctcgtcgacaaagggcagaactggggacatatgggcctgcactatagtgtgaggttggtagagaatgtgatcatggtcttggtttttaagttctttggagtgaaagtgttactgaattactgtcattccttgattgccttgcagctcattattgcttatctgatttccattggcttcatgctccttttcttccagtacttgcatccattgcgctcactcttcacccataatgtagtagactacctccattgtgtctgctgtcaccagcaccctcggaccagggttgagaactcagagccaccctttgagactgaagcaaggcaaagtgttgtctgattctattttctgggtattttaggaagagttgggagttgccaagagtaaccatgaaattgaacgaaaggatgaggttcatgggtgagatacccatcagtacattttcttgacttttctgttaagcctatcagaagaaagagcaactcccaaataggttttattttcttaagagttaccactatgtttggaaacagggggtatcgactatatagttgaaagggtcagaaataccattcacacccttcttacccaagtcaattggaataacttgtcttcaaacactttaggctctctaaagtgaccttctagctctgctcatttgcttgatgcatttctgagctttcctgggctgagctgaaggcccagaatcccgctagaatatatcctgactgatcagaggatatgacagcttaccagctaagagtacctcccaggaaacagtctgactaatgtggaacctgcaactgtcagtgtggctggggtctttttaattccagtgagaagctctggctgagaagaaaatcaccactattaaaaaagctgctccccaagcagattagctctctgttaggattttactagtggccattcagcaaggacctctctttacagtggcacttcataggcacactctaaggagaaagtgcagagtagaattccttcagggcataagccaaaatgactctttttctcagggacctgcatgggcctccagcttgtctattggaattgttaagtgaagcctctcacttagtgcctcattagcagagatttcctccaacccagcttttctgtgctcttggtattttactacttgatgtggacctcagagaagctgaactgtaattgaaaatgtttccgatgtgtggaagaaatgaagactgctttgtgtctgctgttgtcctgagtatttcattaatgtgtgtgtgtgtgtgtgtgtgtgtgtgtgtgtgtatgtgtatgtgtgtagggaagaaagtaataatggctgagacatcaccttcatgttgtttgcgattgggatgggtgactaacactccaaggtagagtgaaggcagaggagggaaacaagatcacattaaatcatcatcagtactggtttctgcctacaggagtttactttttttttttttcttttttgagatggagtctcgctctgttttctaggctgaagtgcagtggtgtgatcttggctcactgcagcctctgcctcctgggttcaagcagttctcctgcctcagcctcccgagtagctgggattacaggcgcccgccaccatgcatggctaatttttgtatttttagtagagatggggtttcaccatgttggccaggctggtctcgaactcctgacctcaagtgatccacccgcctcggtctcccaaagcactgggattacaggcatgagccacctcacgcggccaggattttactttataacaaggaacatatgtttatcaaccctctgttcgttcctatacccccagtggacga

SEQ ID NO: 11 - DNA, 305463 bp, Homo sapiens
tgaagaacttcttatataaggatactccttcttgctccctttcccacgcagaactttaccaaaggtcagtaagaatgggctgttgtgttttctctcaaatcctatacagaagtccttaattccgaggtaaacatctgaatggaacaaatgagtatgatctgggggttaaggcaattttcaagtgtgtgtatgtgtgtgtctgttttaaggcataacaaagtccagagattaaggccgagttaaaaaacaaatgaggacaaaccaatgaggacaaaccagtccgctgaggtgcggccagagcagcagcaactgtggctgctttcttgataaaggctgtgaagacggcacgttttactcttattcgtgtatttcttttgacactttacccctctatgaagcctcagaggtgttttaaaattgtgttaggaaacacacagagataagaaaaggcaaatggtcctgatctagtgtctcagggaagaggctggaaaggaaacgcggcgcgagtggggtgggagagggggcctgtggttttgcttctgtccgggctgaagactgagtaaggtagggcccctccttctgcggatgggtttctctctcattccaccctccacccacctccggttccgcgtgcacgcgcgagatagtccagtgggcccacagataacgaccatcagagattaaagaaggaaagtcagcgagcttgaacacaggcgtcccgtgtggaaatgtccaaggagaccgccagaagtgcgcaagccggagtcggctagagtttccttctcaccgagagggggagcccggcgttcccggccgggagcgacccggagtccccagccccgcgtcccagctgccgccagcgccagttttggattcggcggattaggaagaggagggaggggggagagagcgcgaagagggaggggaccgaagctggagggtcccgagtccagcgccgtgttggcgtagagaaactttccctctcggcctcggagacggcgccccggccgtgccggagtggagatcgccaggctcggaggaaccggcagctctccacgcccctgcccgaagcctgacccgactgcctctctcagtgaggtacggagatttatctaggctcttccctggctgcgaacccaggctccctccaggtagcgtggaatcgcttagaagctgatatcccgaggggcggtgggggtggacagctccggccaccagtgcccgggaaggagggcgcggggctgcgcgtagccgctggccagcaggttgtaaaaaattaggacagctaaatgctcagggagtcgtccagcactaaaggaggctaagacctgttgacgcctgctatggcagcgcttgagaaatgactgggggagtccagcgaggtcggggacgcagcggtctccgggctccagaaacctccttagccttttgtggtaactttggtccggcggcggggggccggtgagcaggaactggagggaggcggtggggaaaccgtggatccgtccggctgagggtgcgtggatcagactgggctgagcaggcaagtcatcgtcgggtcacagcgaggcgacccaggagcgaacttccagggcagcctcccttttgttggcgctgggagagaatgtgggcatgggggtggggaggcgcgaagctccgaggccgggccgcggatactttaaagctcagagctgggagggcccaaaggaaggggcggcgtccacatggttacccttctgctgcgcgggtcaagtagcttcttctggagggcgcaaggcgcggcgggggtgatgagcccttgggttctcgctccgactgctaaattcgcttggccgggtccaccttctcgtggcctcactcgccacacggatcagaatccggagcaggcagttctctctattctgaggctcctgcggctgccgcgctgacttccctgtgtgcgggagggaactctgggcaggctggttttcttggaatgtgtttacgatgttgaatgggacttgaacaggaagctggacgctgcagctggaactagcgtgccaaggtagagtaaggaagacttagctggtgttgggcttggcgggtccacttggtacgctgggcaaactccaagtaagtgagggctggcagtcaaggtacccctccctaggtcctagtagtgtttcccaactgagctcgccttactcatttgcaatcagacattttacatgcactatttcaatctgcaagtttgacaaagtgtaatgcagtcaattaggaaggatttaataaatttattttgtgcctgcttttaaaatacgttacaccaacatttgagaataaaaagttacggagaatgttcaagtcatgactgatttctaggactagcaggagacaatactgatgattttgtgtctgtattacaaaatgggtgattaggtgctaaagtaagggagattattagacagagtgaatgtgaggaagtggaaaactttcagaggaattggaaattcttcaaatttgcaaattgctccctttctctgccagtctttcccttttccccccatatgaacaagtagccttggctggaaaacccacaaattgggagagtgcagtcgctggtgactacaggctttgctggaaacagcagacaggctaaggtactgccccactgcataattaaaggtctccttgagctgtccaggagtgttttccaagtttttacgactgacaaggaaaaaaagagaggaacctggccggcagccaaactagactgagctcagtagccaggcatgaaagagactgggcaagttgcaggggctaattggaaaggggctgtcggttgcacttggggtttaaacaagaggtttcttttgcaatgagaatttttaggtggctaagatcagtcttcttggcaaaaaaataaactaagcatagagtgcagttggatatgaccgaggaaattacaaaaagggctccaggagcaaagtctgaactttccttatcagtgttgcagtggaatagctgggggcctgatgctgtttgtgctgatcatactttgcaaatgcccacactttgttgctgtttgtctccttggacgaggtttgctgcaacttcaattccttgacttcggccttactttgttttcatagcagcaagaattgaagacttaagggtttgagcagatggttttctacctaaattgaataattcaattacgtattctcagctagcatggatttgggtcatggaattaaagtagaaacgtatccggcatgacttctttgtgcttatcaaaagtgatcctgataaacagatcttgctctttcatgtaaagaagtaaaaggtgagatgatctcagtatttcacacatttgccctttactgcttcctaattccaaaccagctaggaactcaaagccttaactgcaattcagactcttctttgtgtattaaagttgtgtatgtttcatctctcttttttttttcttcagagaggtgggttgtaggtttactattgtgggcttaggggttaaatggttaaaacaaacaaacaaacaaacaaactaatgtggtttatatttcctctgtatttaagagtttgagattgtgaatattagcctgctttctgagactcactttgtgaatcaccctcagccaaatgttttccctgactatgatttcagtttttccacttgcaaagtaaagaaactttcctttacataattacaagattattgtgagaattaaagagatgaaataatgttaataggcttttcgacataaaggtcataggatttctgactcagctgactcagttgagtttatggggataaaataggaatacttctatgttgaatacccatgtaataatgacatatctggatctaatttataaaaattaccacttttacattttaatcatagctttaatttaatcatacattttaatttttgaggatataagggagattttgttatggttaaggctgagtcattttctcaaacagaaaagaacaattagcacattcatttatttttatttcagtttatatttatacacaagaccagttatttttaaagtccagcttaattttacctttatgagaagttaccaagtatattcacagaacttggctctcttctcagaaataatgcttgagaagctgaaatatatttatgacatacaaacagactttcttttcttaatggccacaacaatttccttaagaatttggaggatagattttggagccattcattaataaatccagccaatgtttgttgcatgcatatcatgcatcatcgggcctgtattccaatcagcaccgaacttctcagctctgtgatttctgtgcatgttattttacttcttaaacatttttccaacatatcatttattgcctatgtttctgtctataatttatgagcctgttcattgttgattcattatgatcattgtgaaatatttactttttagtgtgacatgtcaattagtaaaatatactacatatttttatggttcattgtactgtgctacagtcatggatgtttaacttaactctttttcgggtgaacagatcaacttattagagaaaacagaataagtatagataaattgtttaaaggataaagtcttttgctaaaatacctagtcatagcttttatttttagactttatattataattaatagtgaatctgtaaaaagcacgtgtatatgggatatagtagttgggttgaaacttacactatgggtatccttgaacaagtggctgtttgaggatatattagggtaattttaatataaaatgtcaaattttacctttcattttaaattagaaatccttaaaattcttatttccattgatgaatggtaggtgattttaatttaaattttacttagcagagtgatgtatttgtgattcaattcgcgatattgcaatttgttttctaaaacctctaaagaataaaaaaagttattttatttcagtataataatgaattcaaagatagttacagaagctaactgcataactgccatgagccctggtccctaaacgtattagaggctggtggatctaatattgtttgccttaatgcatttagagatcaggaaacttaagctttttcccataagagcataaaatatactcagattggaagaggaaaaaatggtataactttgaatggagaaatcgcttcactttcaaatactggggatatgaaattgaaatcaggcctttatttttaaagagaatggctaaaagtcattgttccagagtaagacttagaaaacaatgcttatactgttttcaggcccttgttatttgcgagttttttgtttgttttatgcctaagaaatgttttcagccactctaatgatgcttaccatgcatgattgtcatcagaggacagttaattgactcaaatattgtgtgggatagtaagtgtcaattttctgtttacattgaaatggtatagttatggcgaatttgaaattagttttgtctttcagtgtagtatacttaaaaatagttttgaaaaggctgccctaatttgcacacataatatgaataagtaagttaacttatatagaaattaagattttcagtatattttgtgctaaattgcaaagattaatatggctttttaaaggaagttttgaatagccttgtatgtattttctaggatgcaactaagagagtgcatctagatatcaatacctgcctttatttcatgtttgttttttgctattaacattatataaatgtacctatacatcagctgtatcatatacctcctgatgaagaagttcagaatagaccttagaaacttccatattttgggggactactttctctctgtctctctgtctctgtcgttctctctctctttgtctgtctctctctctgtctccatttctttctccctttctgtgtgtgcatacttatgatacatatatattctttgatgtttctctatttgtgctatagtttttctgtagggaaaaatagcttcagttaattgatatttttgagcccaattttaacaactaattaaaaatgtttcccagataagtattgctagaaatcctagaaatccttttttttttcttttttccaaattctaaaagtgtttttagacttctatttatacctccgaaagaagagaaaaatagttggcaagatcttctacctacattctttgttgtaggctctaatgatggcatactcatggaagccctttctactcttcttaagtagaacacaagcacatgtacagttaactactgtaagaaggtaaattcactacttagaagttagatactactgataagtttatcaggtattgtgaagtgagaattttatacaaatgtagtgttttcctggtatggtacagctttttcttaatattaggtgttacagttgatccatttcttgaaacttcatccaccagtcctccaggaacatcaaggatcttaaactttgccagagctacaaaggcaaagtttaagatccttgaagttcctgggggaaccatggatggctatccttatttctataagagaggagactgaatactgtgggctcagtcttcagtctaccctcttatagaaataaagacaatcatttcagagcatacataatctactgactgaatcattaatgatttgcctgtttatagctgtataatatttcatgaggtgataactattgttctcatttggtttgtatttaaattagataatatcaattttaaatataattttagccaaaaaaaatcaaacagaacatttgtagtatggtagcaaacgtgcaaatttgggataaaaaattgaaataagagaataaatgtgattttagcttctcaatttttttcatagccatttataaccatcaagagataccatgttttaagtaaaattttaatagcaaataggttcatttacccagatttcaacctaggtgaattaaaacatagggttataagtactaatgagagttttaagaaacagtattttgtaaagtatctttgaaggtcaaactacatgttatgctctgtaatttattttatttttgtctgctttgaggaactgtgtagtaataaaggactttggttgatgatcaaactctccttttacttccttgatgatgtgtgttattatagtcataaagatgtccaataacataaacactgaactttactagtagtgcaaataaatacagagaaagtttggctgattagaaagaacaattgcataactgaattaatttcaaagcaatttatctctatgctgaatatgttaattaaatataattagagggtgtttatggattgtagtatctcagaatatagtttgagagaatttttaaggagtcacatttgagtaaacaaattttatttgaaattacgtaaatgcaatatgaaatggcaaaagtctattggtattttagatttataaaatagcattgttttagagtaacaatggctattgctttaaatttttatgaattattttttctgttttaatgcatcaccatgactggatatgtaggagaaaaacctttaagcttcttagcagtaaatcagtaagaggtctcatattgctaatgtctttagtcattttaaaggaagaactactaaatttgtaaaatctgagttatcataggtttagctgattacattaagcagactaggaaattcatgatcaatttggaaaaataaaattttctagagtagtacagatgaggttttagagaacaacattttagacttgatgttgttggaagtaaatgctcggtgctgccaagtgaatatagcactcaggcaaaagtttgctcagcaaggcaatttacttctataaaagggtgcctctcacggatggagcaatggcaagagcacaccagacaagggaggagaaggggatcttactattaatgcagctagtccctactgcttgtttttcccctattgggtagggttggaccgcacagtctaagataattccaactggctattttaaagacagcaggggtatgagctggagtggcggggtgagaagctttggtgggaaggacggttacagagcaggtgaccaaggatgactaaggacagagcaggtgactaaggagggagcaggtgactaaggatgactaaggacagagcaggtgactaaggagggagcaggtgactaaggatgactaaggacagagcaggtgatagaggctaggagggggttgtttactaaagctagggacaaggagatgtaaagaacgaggaagttaaactttcaaatggaaaacaaagaacagggaagctcaatatactaacatattggttctttgaagaggaatttactgtatcctacaatgtaatgaatctttctttgggactttcttattcaatgagattttgtctttattcagtgattttccattcacttaatatacatttgaagtctttccccccttctcattctgggaaatataactgtgtttaaactgtgcatctgcaaataaagagattctgatatgatacagttgaatttaataaatacttatcaaataacacttgttctttttgtagttgtgtgattagtaggtgacagagacctcctcttattaacttaaatagaagttggtatttctatataattctgaggtacagtgcagaggatgttgaggaaggaggagtggggaaagcgggtattcaccagtgtgaagggaagcagtgtatggaaagaatgtgtgcaggtgattcttagaccaagtcacagaggatgaggatgagttgggcaggcattgaaaagggacagtgtcagtcagagcaggtgggataggcaagaaggcatgaagccatgaatgtggtttaggagaacaacttgtggattttacagttatagagatgttcctcctttatgtttccatgttcatgaactaaccattagtaattacataaaggagttttagctggattaatagttttagctgaataattttagctggattatcttgcaaaacaaccatcttgtttttctttctttttttccatttctccagacctgatcagcatgtaattggaatcacaaggagtaggttgtgctctcgatttcatatttatatttaatttcagaacatgcaaattaaaaaaatttttaatcacagcattaactatattgggaggagttatgatttggctctgcatcttgtcttatatttgtttatttttcatatataaagaacagatgtgttaaatagttatctacttggtagtaagtaactgtgccagtattaacaatttttatgaataatattgaaaaaataatttttttctgaacatatggaaacttgataatttttctatgcatcattgacttatttaagattatatatttggttatatggtgtggattacttactgatcattgttgataaaaaatttaaatgtgtgctaagaagtttggaaaacgaatttagaatatgtacaagtacaacaaattactatcttatgaaggggacctataattaaaacatatataacataatttagttcgctatattcccttctttttgcttggcttgaccattctgtgagatacatctattttaaaattagtttattattgatgtttgatttatttgaaactaatgattcaactttatttttgaagtatgtgacaagagcagtctctttaaacttgttaatttgaaatagttaatatatagagcttcacatttataaatcagtttagtaggtctggaccaccttgaagttccagggatgggtctaaggtaatagttttgtacttgaaaattgacaatactgtcaagatcacaataagaaataactgtctttcagtctctttctggcttttggcttcactttgtgttttctgtaatggtaagcatcaagcaccactgacacttatttgcttccttctcctgttgaatgtccaggttcctgtttatttatttatttattttagagacagggtctcactctgtcacccaacccggagtgcactggtgcaatcatagctcactgcagcctcaaactcctggactcaagtaatcctcccacttcagcctcccaagtagctgaaactataggtgcatgccaccatgcatggctaatttttaaatttttacaattccttctagagacaggttctcactgtgttgcccaggcttgtctagaactcctgggcttaaacaattctctggctttgacctgccaatgtgctggtattacaggtgtgagcactgtacttggctccaagttcccttttaatgacaatgacattgggttaaaccaggtgtgattttgtacctgaagttaactcttctttccgtttcttgcatttccatttgtaagaagcatgttttcacttttgagagctatatcaccttccttgtactgtggcataaattattgatagtccactaaaatctattccttattcttcttttccctggtattattcaaatgtccactctttcccacataactcaggggaagtcaatcctactcctaattcaagggaattttagattaggttcagctaaaaatcttggtgtttctatgccccttggcagtgattgttccttgtcccagttttagtcatatgtcacatgtcaggtgaaatgagaggactaaggggaatgggtagaaaagatttagttccacttagcaagggaacattggatgagaaagcacatgttggcttttgatatttgtcctatctggaatacatgcttcttcaaattgctacagggatcatcttttgtcacgaggagattcagcttgagggcaaaacaaatgccttaaaatggcagaaaaaatataaaaccttgggtacttgatggaatcattgggttcttgactccctactatatttctggatttactgctgtgtgagataatgaatttctttctttttcaaaccaacttgaataaaatatttggctacttaaaatagtatcctaattatagccattattaaatgatatcttaattttgtaaataaaagttttagaagtagtaatttagattattgaagaaactttacagactacttgggttttgtaaattttagatatggttagtgctattagtctataaaaacttattattcaaatcaccatgcattaagtttttaatacagtagataagtcaatcatcttattaactagatttattttaaaatgaataaattatgcaggaggtagaggctagcaaaactaggaataatctaacaagctcagacaatagagaactaaatttaaaattttttgaaatataaattcataatctaatcagttcacaaaattataccactatttattggctgtgtggtatctttagtgtattgaaaacattaaatatacataaagaaatattgaagcaatttcagtgcctggtctgagtaatttaaaacttacagtgtgatgttaagactaattagtaactatttaaatatagaagataaagctgataaaagtaaaattttaaaaaatggtaaactatagttccactcacagaggtataaaaaaatacagacatacagtaaacttttaagtaagagctagtgacaaagattttctccttgaccaaatcctggtcaggctcttgtgcgtcctcttctcaaccaggccttgacttttgggcttctgtgttctgatctgcattgccaaatttagcaagaatcctgctaagtgtctttggccatcctcaatatttgaccactctatatctaatgagggtcctcaccttccaccatttcccagatgatatctcatcaccctaaccttcattcagcaagaatcctgactagtaatttttcttccactgtcttacatcctgctatttggctacaaattcctactttttcttgtagtatttgaagttgagcctaatttttcttactcactgcaaaaaccccattgcaatggtcccaacgcctgttatgatggtcctgaataaagtttgccttcctgttctttaataatgtcatgaatcatttttttcaacactaattttataaaactctagttcactggaaccattagcaatttaatctttttctgccaccaagttcttgacctgacccagcctttacaatgacttagcagtatgcatattggtttttgtaatgtgctctaatcaaagtagggagatatatatctctttgtctttttgccctgaaggtggtaggaataacccaaatctgagaattgacaagagcagggatgaaatatattttggagtattattgctcgctttagctgaaatagttaaccaagtagtttaagcaggaggtggaggcaagcagaactaggactaacctaacctgctgaaagaataggcaaagtgtcataatgggcaggtttgctgggaatgagggatgtgagaaataaaaagccagaggttgtgtgggcagtgcacttgaagagagttggtgaaactgtaggtaggaatgttacagatgctgaaagtctgcagtaaagctgtgtggcaaccaggtcattggtcaagactgagaaaggctaatgtattagaactggtatcagtatgggtgttaaaagcatggagattgggttggagggaaacatagccaataactggaatacctaaggaaagtgaaagagacattagagaagcagttattgatggcgacatttgaagtaacaagacctcctacattactgtgattgacttgtgcatattagtttttttgcataagaatgcaataaacatgcttgagatgcttgctttatgagatcatgaccttcattcatggcaactaaggaagtcaccacactggggaagctaggcaagggagaccagagaatacaaagtgctgcaattctcagaggattactgttcttttggaaatgattgtttagagattgtcctggggcccccctctgcccttacagaataggagtaccctctggcgacctttgcttgttttaaaagggagccacattcttgtgggtttttgaatgagaataaatgctgcttggtatggaaattaccataaaggaactctgcttatggaagagtttggaaattatagtagaaaatataacttggctcacagcagatataaaatgagggaaaggatgtatatctagataattcaatttccaactcccacttgtgctgaaataatcagataaagtaaaaatagcacccttccttaatttgtctctttctgtctattaagatcttcataagattcataagattcatattaacatcttcataagatttctctaatctattttcttatacctatgagttgacaccaaaatggatttttcgaaccagagagtaaagatacaaagaatagtatttagagtgctatgtcctaagcatcatgttaaatgttttttacaatttacaaatggtaaagaaacttgtctaagtatccacagccagcaaacagtggaaccagggcaattggtaggatgggaagtaatgcgtctcaaccaccatactagctgaaaaagtgtgctgttgaatgccaactggacagttaggccacctttgtagctgtctttacaagtgagaatgtaacacctttgaattacctgacttcctagattcctggcagatgctcgattccttcttttttgtccctctgatggcacaatgagctacttatttcctgctcttaggcatagctacttgtacctcctgtgtgataagacatttgttcattttatcctcttcagtcagataaagcataaaaattaatgcattgtttaaggaaaaactctcaaactatgtttttcctctgctctcatacaacaacaaccagcacagatgacttctgtgaccaaatatatgggtttttttccccatcaataagcagtggacagcaaatgagtgtcttctaattcaattctgacattatctctctggagataatgtcagatctcacaggttgagggctcattccccaagactgcccctcatgcccctccaacacttgttggaagtccgggcctctgtaacttctgacccactgacttcaagctggagttcccacgatcccctctttggatgtgattaattcgctgaagcagcttacagaactcaaggaaacacttacttatgtttaccagtttattataaaggataatagaaaggatgcagatgaagagatgcatagggcgacgtatagggacttacatgccttccctgggtgggccaccctccaagaacctctacatgttcagctatccagaaggatgctctctgaaccctttttgggttttgaggaaggcttcattatataggcatgattgacaaccaacagtgtagaaatgtgattggacaaagcacatgatctaaacccagaaaggcctgtctgttcagacttttcttggcccctctgtgtagcattccttcctttagggtatgggggaggactctctgtaatgagtgttttgattcacaatcagattagagtcctgcttgggcaggtaaaggaaggacaggaggtcagagaggtttcctgaggcctaaagtgctccagcattataacaaggactatgaaagttgggagccaggaaatgtggatgaaaaacaatatataattatcgtgataccacatccattgacaatgttttgtctgcatattcctttgacttttgcctgatttgatttgtcaggatagttaaaatgttaggtgagatagtctaatttcttctttttaaaaagattttcaaaatttattttcaagacagtcttgttctgtcgcccaggctggagtggagtggcgcaatcttggctcactgctgcctctgcctcccaggttcatgtgagtctcctgcttccgtctcctgagtaactgggattgcaggcatgtgccactgcgcctggctaatttttgtatttttagtagagacggggtttcaccatgttggccaggctggtctcgaattcctgacctcaagtgatccgccctcctcagcctcccaaagtgctgggattataggtgtgagccaccgtgcctggcctgatttcttcttaatcccatttttcctccttggttttgtcaaatgataagatttgggtaaatataacctaagatataaaattactaatatcaatagtttctaattgttcaacatgtacttttcacttaagtatttgataacatttttcttcactgagaagatggactagataacctcagagaacatttcagcccttagggtagtctaaaatttaactttaaatagtttattttcctttttttaaaaacaaacctaaaaccaatttcttaatcaaaataccatattcaaagttgtcctaattttggcagttaatttcatcattttgtctttctttggtaagttaaactgttagacatttgatctctgtggtatttgttgctggggtattataaaaacgttctcttggcaggggatttgacattctagttgtgagggaagatttcttggtagaaagcaatgagagtgtgcagagagtggttcaaatgtgtaagcaggaggagagaatgtatggtttagctacagaataggagactgaaaatagagctagagaatagggtagaaagagaagagggactaaaattgctggagatgaagccagtgaggcagggagtcatctggtcagactttacaatccaaagtttgtacttcattctaagagcaattcaaaaccatttaacaaaggttataatggagttggtgacaaaatgtcatcatctacgttttagaaagagctgagttgatgtctgccaatatgtctaggcaagagggagtggaagcctagtttagagggatgaccatgggaaatgacttcattccaagatattaaagaagaaataatgttttgtactttttgtgtatttgatgactatcaataattgtgggaggtaaacagtaggatgtaggcaggagaatggcgtaaatctggattctaagttttctggttttggtaacttgggtgtttgtaccatttatcaacagaataaatacaatagaagcagaattattgaaggaaaataatgattttgtaggtggtcaataaatgatagctagtattattatgtcatgaaactatgattcttggatttttatgtttaaattttacagtataattatatgctgttttcattttgattaacaaatatgatattttatgaaaataaatttatacacaatgataaatacaggtagaacaacttcaacgtatcatgtaatttgtgacttacaaaagataaaaattaggatacaaaattaatttctgttttgacatatctgcattaaaaagttatatgttttcagaagaaaatacataccagtttaaaaatattgtgtaatttgaagtgagatacatctcctttttcgagatttttttttttacaaataaaatatggtagtaggaagtttacaatgtaaaatattcatatgaaacaaaataagaaagcctcaatcctaaaattatgtatgagaaagctactaagttttttagttcacatgggtcaatagttttcaattatataattaatttatgctgttgaaacacatttaagaatactggagtttagtataaaggaaaaaaggctagtttccctggctgttttgatttgcattcttctttattgtttaattataattgagatcatgtgccacacactggtttgtagactgagttcttttcacataatatgctgtggtgtatagccattgatttaggtgtatttactgatatgggagcaggaagaacttcagaaggagaatcctgtggatctaatttcatgatttcatatttgtagtactattaaagataaataggaaatggtgtggattgataacatctaaacagaaaattagtaataagagaaacattaatcatttggcagtggtttttgttggaatcactacgccagcaatttttcaccagtagacaaggatgagtacattataaactgggtgtcattgtgccagtcctgcccctgggctttatctctcactcagctcttgatcatgattactaaggcctacagtctgaatcttttaggtcatttttttttttcccccggtggcctgcattagcatccacatgtgttcagactcaactaatttgattatgaggagagactgtctgtgactgtcttcctgacatcagcacagtcattaaagtaacttaacatcatggacagaatctgttttttaggtttggtattttaaatgcatcatttccatcaagggctaatggcaagctgcattctgttttgtaaatgtacatgggaaagtaattatcacagaaaaatgttttagaaaataattttcctcagtattaaaatgaaaacattacaaaaaaagcttttgaccatcttttccccaacatttaaaaaaggttaaaatttgaaaaacaaatatatgagtgtgtgtttgtgtgagagaacaaacccacagaacataaatgcactagagctttgttttatgtcccccatttacatcttatgtactgaacttctccaagttctgaacttctgcaagttcagtaaaaaagatgaagtgtatagtccgtaagatgttatagaatgccaagatgagttattaaagacttactgaggtgcagatagacctggctccttaccagacattcccatggtgtgtagtcttgctcctggctccatcacttgctagtaaagggtcttgagaactcttatttagctctgagattattcagagattatttggcttttctagaagtttttcttgaatgtaaaatgaagataatggcccgaaccttgtatgcatcactgagaggtataaaagagagtatctgccgtggtacttgtacattttcatggagctttttcttgtgtgttccctcccttagcccccagattattagagttcgtgtgtctctgtttagcttggggagcaggcagcatcagattttcttgttcttcatctgtcagatcaccatgaagctcctaaacatccatagttaacatttatattgttactttgttgtttttgaaattgttccttttcacagtttgaatccaatggcatttttcttttcgatcctgtcttttgggagatgtaacatcacgaatgatctctgtcttaagaaggaattggctaggcttggtggctcacacctgtaatcccagcactttgggaggttgaggtgggcaggttgcttgagcccagcagttcaagaccagcctgggcaacatggtgaaaccccatttctacaaaaaatacgaaaaatagcctggcatggggatgtgcacctgtggtcccagctactcaggaggctgaggtgggaggactgcttgagcctgggaggttgaggctgcagtgagccgagatcacaccactgcacttcagtctgggcaatagagcgagaccctctctcaaaataaataaataaacaagaagaaattaaggtatattatcttgagattccaactcaatataagaaagaagcttctgataatggatcaagattgattatgcaatagtgatgctctgttactgaacctttttggagaaaggctgagtaactacggatcagggctattgttgaagagtatcccatagcttgtctgtagcttaagacattgagagaaaaaaaattttaagtccaactgtgataattgaaatttaaattgagtgatcaatcttgtggaataatatttgtaaatacgggagagccaataattgtgtgctaagtggatgaaggctgctggggttcctgcttttactatgcagactttcattcattcaacatactttttaaagcttattttttgctatgtgccaactactgtgctagattcctccaaggtattcttaatgtcagagaagagtggacttataagcttaatctgccttctgcaagtgtacttcctttgaagtcttaaattcattagaatctggccttctgcttcataaagtttgttttaaagtaaaccttctatatttcagttacaatgaggcaatttcaatcctctaggaatatgggttattaatttctgtgacttcatttactccccaactctgctacatttcctaagtgtttatgtgcctctgttagagttctgtagctgtggactctgaggaaccattcaaggtttttaaacaaaataaaaggaagggaaaaagaggaaaggaacatgatacactttgcacttataaaacctcacagctttgagcaagacagaatgaagaggtatgagaataaagtaatataagtaaattggaaaatgttaaaatagtctcgattagagaagatgaaggcctgaatttaagaaatatcaaggagattgaagaagaatgaatcagggtgatgtttaatttatagaaattgttggttgattggatgtgagcatatcaagaaaaagaaatagaatcatgtgtaaattgcaagcttgcttggttgactggattgcagtaaaattcaccaagacaaggaaatatgagacaaagaatgtgattggaagaaaaaagtaagaattcttctttgtatttttgagtttgaggtgttttggggacattcagggagaggtgctctatagtgagttggatataccatttggaagtagggggaaatcctgagatggagatggatttgagagtcctcagcctggagatgactgtcaatggcatgaagtcatacccctgagagcactgatatttgaggagaatcagaaaatgagaagccagtaacagacacagagaagaaaatctgaacccataatttcaataccagagggacttcttaaacctcataggaggaagctaatagagatctaaactagatcattttagaagagatagaaaagaaaggactaacttgaaaaatattttaataggacttaactgtgttaaagatgaaattgtatctaatatttgtcagatatttctagaaatggtcagcttagctggccagggctttgtgttcatttttgggttgcagctttccgtgtccacacagttccttacctgaaattgaatagagatttcagaagcctggcaaaatgagtttcaatccttggtcaaaggataaagaattatgggcctccaactcaaggaattatgcccaattccccaaataatatttctgcagttggttattggtttccacaaatacttttttttttttgagtcggagtctcgctctgttgcacaggctgcagtgcagtgacatgatcttggctcactgcaagctccacatcccgggttcaagcgattctcctgcctcagcctcccgagtagctgggactacaggcatgcgccaccgtgcccagctaatttttgtatttttagtagagacggggtttcaccatgttggtcaggatggtctgtatgtcttgaccttgtgatcctgcctgccttggcctcccaaagtgctgggattataggcgtgagccaccatgcattgtggagttaacttttcctttttgtgacttcatcttgagctttgctgattctgacaccattttgaatttgaccagtcatttaaaagaagtagagatacctagaaataaatatgagtagatgtatccaattttaacaaaattgattttctcagttactgaaatttactatgaagttatattaatatttagaaagcattttatgataagcattataaaaatgtttatttatatttatatatttataaatctaatatttatatgtatataataaaatataaatatttaaatacaataaatttaatatttgtatgcatatacttatacgtataagtatatacatatgtactataatacttagaagcattatatattataaatatatacacattacatatttattatatattatattaatacacatataccttgaatacaattactactaaacatttcttaactcaaactggctttttaacaaaataattctgacggaaaaataaagaatttagagaaatacagcattaatatagacttctaactacacttgtagtgaggtctttatagacagctccttcaatataattcaaaaacaccatacctagatttgctattgtctttctgttatgtcatatctctttatgtttttttctttaaaatacctaagtactttagaaaatatctaagactattttttttaatttctcctaaaaaaaaacccagatatatgttcagaatgtgcaggtttgttacacagatatatgttttccatggtggtttgctgcacctattgacctatcctctaagttccctcccctcatcccccatccaccaacagaacctggtgtgtgttgttcccttctctgtgtccattgttcaactcccacttataaatgagaacatgtggtatttggttttctgtttctgtgttagtttgctgaggatgatggcttccagcttcatccatgtccctgcaaaggacatgatctcattcatttttatggcagcatagtattccatggtgtatatgtaccacgttttctttatccagtctatcattgatgggcatttggttggttccatgtctttgctgttgtaaatagtgctgcaataaacatatgtgtgcatgtgtctttataatagaatgatttataatcctttgagtaaatacccggtaatgggattgctgggtcaaatgctatttctagttctagatccttgaggaatcgccatactgtcttccacaatggttgaactaatttacattccccccaacactgtaaaagcgttcctaattctccacagccttgccagcatctattgtttcctgactttttaataatcgccattttattggcatgtgcatttctctgatggtcggtgatgttgagctttttttcacatgcttgttggccgcatgaatgtcttcttttgagaagtgtctgttcatatcctttgcccactttttgatggggttgtttgtttttttcctgtaaatttgtttaagttccttgtaaactctggatattagacctttgtcagataggtggatggcaaaaattttctcccattctgtaggttgcctgttcacgctgatgatagtttcttttgctgtgcagaagctctttagtttaattagatcccatttgtcaattttggcttttgttgcaattgcttttgacgtttttgttatgaagtctttgtccatgcctgcgtcctgaatggtatttcccaggttttctcctagggtttttatggttttgggttttacatttaagtcttgaatccatcttgagttaatttttgcatcaggtgtaaggaaggggtccagtttcaattttctgcatatggctagccagttgcaccatttactgaataggagatcccttacccattggttgtttttgtcaggtttgttgaagatcagatggttgtagatttgtggggttatttctgaagtctctgttctgctccattggtctatatgtctgttttgatactagtaccatgctgttttggttactgtagccttgtaggatagtttgaagtcaggtagcatgatgccttcagctgtgctccttttgcttaggattgtcttggctatatggggtgttctttgattgaccatgaaatttaaagtagttttttctaattctgtgaagaatgtcaatggtagtttgatgggaatgtcattgagtctatgaattactttgggcagtatggccattttcacaatattgatttttcctatccatgaggatggaatgttttgccttttgtttgcatcctcttttatttctcttttatttattttattgagaattggtattttattttattgagaattggtattttattgagaattgagtattttatttattttattgagaattggtatatagttctccttgaagaggtccttcacataccttgttagatgtattcctagggaaaatgcctaactaaggcttttaaatttttttcttcttttaaagtttcataaaaaggaaaattaaaaaaaaaacaaaatacatataaaataaagtaacataataagactccattcttggatctagtgctggcatgaagtcttaacactgtctgtagagtcgtttttagtcatttttagttgtggattcttttgaattttctatattttctatatagttcttggtaccaactggatagccttcaagttacttaatctgtctatataaaatggaggtcactttggtgagaaaaatctcttcacaaaagtttcctaacaaaatactagtagtacagtaggggaattgtctctgtccttaagaatcattttttattacttgaaatgtcaaagtcaaactttctcctgtgcaaattttttcttttaattgttatcctgtaaagtgaaaaatagaacccatgtcctagtgtcctagatctttatcctccccctctccatttttcatgatttagtttcttgcatactcaacaacctctctcctcccacttgcccaaggtcacacagctaggatgtaggcctcagccaaatttgtagtcagccagtatgtctccataacttgtgcttttaccgactacaattttttaataaaactaactttgtaaaacctcctttggctccacaggctaagtagattatactgtgctctgttgccagccccactacactttctttatgtaccttttaaatacattacagtagtctccccttaacaatggttttgttttctgcagttccagttacctccggtcaattgtggttggaaaatattaaatggaaaattccagaaataaacgattcttgttttaaattgcacactgttctgagtagcgtgataaaaccccacactatcccctacttttgaatcatccctttgtctagccatccgtgctgtctgtgctccccacccattagtcacttagtagccatcccgttatcagatctgctgtcttggtatagcagtgcttgtgatcaggtaacccttattttacttaataatggcaccaaagcacagagtagtgatgctgagaattttaatatgccaagaataagccttgaaatgcttactttaagtgaaaagctgaatgttttcaacttaataaggaaagaaaaaaaatcatatgctgagattgctgagatccatggtgaaaactaatcttcaatccatgaaattgtaacgaaggaaaagaaactcaggctagttttgccatctcacttcaaactgtaaaagttatggctgcagtgcatgataacttttattacagtatgttgttgtaattgttcttttatattagttattgttaatctcttactgtgcctaatttataaattaagctttatcatatgtatctataggagaaaacatagtaaatataagatttggtgttatccttggtttcaggcatccactgggggtcttcagatgtatcccctgcagatgagggaggactgctgtatagtgatatttttctgtctgtattgtggcctatcagagtctgtttcccaatgtctttgtttcagacctttgaattttttgtatttaatcattgtctttatagcacttagcatactacttgatgttaagaaagtacaaaataaaggtttcttggattaatgaatacagtaggcccccttcatcctcaggagacacgttccaagatcctcagtggatgcctgaaaccacagatagtatgtaaccctgtatatacctgtactatgttttttcctgtacataccaatctatgataaggtttaatttataaattaggcacagtaaaggattaacaataataactaaaagtaaaatagaacaattatggtaatgtacggtaataaaagttatatgaatgctccctctctcggtctctcaaaatatcttaatattttcagactgtgactgattgagggtaattgagccacagaaagcaaaactgcagattaagggaggctattgttaagtgaatgaatgtaagaaacaccaagaagaagcaggatatgagtaaattgctgctatgaaagataaaaagaaatagttgtaatgatggcgattaccatttagggtaaaacgtggaagaaaaagccatgatatttgatctacagttagaatgaaattttatttattgctctgaatagaatgtatagctctctttttgcttgtatgcctgatacaacagagaaaggtagaaagactcccttttacaactcattttctgtttttgtaaaggcagataaaactgacaagtttcatcctgtgacaagaaacttctaatatatttgaagaattacagtctctttggctagcaactaccctctttatggcctttcacacttttttgactttttgtctactaggttgtttgctttctggtagattttttcattacagttgcacactcacttctgtacattttctccatttgagtgtcccaggtcctgcattatgtcacttctctactcaaaaccttccactggcttccatttcatataaaggaagagtaattacttgggaagtcccacatggtatggcctcttgatgcctttgtggcctcattgctcactgttcacacagcgccctgactgctcctccccagctgtcccttatgcttcacttttcaactcctgctttttcctcagaagtcatcttcctgggaagcctacccttacctccatatttaaaatcacaactccttggtatttcccattaatcctattttaatattttcagtagtacttatcacctaatatactatatcatgtaataatctggtattcttaatatttcttatctacaagagtagaatccccataaaagtagagattgctgtgcatttgtttatattcctaggaacccaaaacctataacagtgccaggcatgataggctttcaaatatttgatgagtgaatgaagaaacaataaattcaagatctcatttcctttaaagaaaacatgcctccttgaaaatgcttatattaaaatatgccttgggaagaactgtgagaaagatgcaaatgttagataatgaattgggagagggccacacctgcacttaacccttcctctgttacctgagtgccactacctagcaaaatcggtttttatctcatagacattagcagaaaacaagccaaactctcccccatgatgtatgtagccctgcacaatctggcctcagccacttgactacctcatttcatcccataggaaggaattacgtaatttttcatggctcgtttggtttcctaagattatatgtatgcacagatgtaggtgaggactttaatcctaagaacatggttcttttcagattgaattgcaattttctcctgaatgaaataggaaacatatttttacaagatatactggaagtaaagtgatagtcgacacaatctagtcaactgggattttgattgatgatctggggagtctaagaagcagtgacaaccagagagaaatatatttagtataatttaataataacctgatttgcatgtttttgtctgttggagtaattacatagatttatctcttatatctttacattgttttatttttccagattatggtgcagtctgtcaaatgtttatgtattgaaaaggccacttactgatagagtatgagaaattcagagtatacgtgtttttgttgtatttatatgtgccatgttaatggatagctttccttggaaagttggggaggacatagattttatttataatgtataataatatacttaatcatgactatataacttaaaatattataaacatgtattttaaaatatgctattaagtgaattagtgaggttttttttttatattgtggcatatgtatagtggatcgaagatgatattagatggaatgagaaaagtttttctgagagtaaaactatagttccataagtagattgattttatgatcacagctttttcttttccagtttttcattgttcatttttgataccttggcaaactaatctttagtgtcagccaaaatttcacttggctatttattgtaaattgccctaattgatgagtgaaaaaacttttgatacctgcctaatcttagttggatgaaataactgatttccttctaattaatttttgctccataaaatgatatgttaataaatgaggaaaatcagtcatgatctagaaagtgcagttattcttgttcagaattaaataaagcagaatggagaaaatgcaaagcatttttttgactgttgactgactatcgctatatatgttattttagtgaatcagagtaagtctcataaaagttgtaaaacatttagtcagagggtatataaattttttatagctagtaggaaaatttctaagtccttttaacatgcccaaatgtgctgttgttatcagttgttttattttcagacagataacaaaaatgtcaataaaattcccagagtaacaatggtgtgctgatggtattcaattgttcttttctttcaataaactccatatatggaaatgtagctcaatatgaggcagaaggtgggactcaacaacggagacagggctggaacaccggatcaaattgaggactagctaaagcaaggaaggggcagaggcagctttccataagacatgcccagcagtgcaccatattagtttatcattggcatggtgagttactataagttaactcccaagttaccactgctttccgtgggaataatccaacaacccaggagttattacccttttcctagaaatttctgcataatctgccccttaatttgcatgtaattaaaagcaggtataaatatgactgcagaactgccttttagctgctattctaggcgcgcttcctatggggtagctgtgctctgcaaggagcagtgcttctgcttctgctgtacactaccacctcaatagaggctcctaccattgtcatgcctttgatttctttcctggacagagtcaagaactgtcccaagctaagccccagtttgggggcttgcctgccctgcatcgaatacattatttaatttatgggtgatatttgttttctaaacatttttaaatctgtggaataaactctgtagaatttagctagcaaattcctttattgggaacatgattaaagctgttattgtaactgttgaacaatttctatattatacaaagcaagatatttgcattaaatgttaataagctatagcagaatttttgcatcttgcttttgggaaagcttattctttgtaaaaataaaagtttttacacatgaatgcattcttattataaaagattcaaacacaagacagagagagcaaaataggaatgtttaccttcatggcccccttacacccacgtccctcagaggtaaaaacaatagtttagtatgcattattccagtacaaaattttgaccattttcagacttgtacatcttgatgttaatacattgaaagatggaatcatagtgtatattcttttaacttgggttggaggaggtcaacatactttggaaataaagagatttgattttacaactgaaggtcaccctttattatttggacaaatctacccaactagctaccactgctagcatctcataggaatgggaaacatgactatgagcatataaaataattgtgttaagtcaggtcattcatcaacaagccagaaatgtagcttaaatagcaaccctttttcttttatggttgtttgccaagtttgcctacagtccttgtatatgtgtgtgatcattactacagcatgaccccatattgcatttctcatattagccataaatacttattacaaaactttagatttttattttgttgattcagagctctttttttgtcctattctttctttcatttgatcttttttgccctttttactttcttctatcattgagcttaatatcttggagtatgtttgatggtgataagtttagtatggggtttcccagtcttggcaatattgacattttgggaaagacaactctttgttgtcaagggagtggccctgtgcattgtagcatgttaagcaacatccctggcctctacccactagacaccagcacagtgcccctagttgtgataaggcaaaatgtctctagatgttgtcaaatgtccctgggaggcaaaagcattcctagttggtgccaaatgtccgctgggaggaagaccatcaccagctgatgccaaatgtcccctagggagcaacaccatggtggtagagaaccaaagtttattagcatctctaaactcatatagtattttttggacatatttttaaaggaaaggtggctatccctgaaacataatgtgttttgaagtataattaaaattatcataaatagaacagtattgaaccttcactccttatgtgtacaattgactttaacgtccttggcagtaggtatgtatttgctgcatcattacatggaaagaatattcactgatgaaaaagtcctctccaacttgaaagaaatgttttcacatatctctgtgagtatcagtaacctggtataagaccttctttcctatgtcctgacaaaagtttatacagcactttgactcttggtattttacaaaaatgtatgcatttgggctatagcaatgcaatgcaacatataaacatattttctgagaagcatgttttgttaaaaaaaataaaacaaacaggctttcaaaatagatgctgcatcataaagtttaagtatgtatggattttctatacataatccttcaacattcatcttctatgtgaatatgggcaatcttcaatttaaatggaaataacataaactaaaattttaagattttacctaaaatttgcaaaactcagtaatgttttaataacaaaaaccttatctatgtactatctaggatatgttttcagacatgttaatctttgaaattaaaaatttttgtactctcctcctccagaaaaaaaaaaacacctacaaaaggaaaagaaaccaactgtccttcagagtgaaatgtagactacttcaaaaaaacagtttcctatatttctagacttaatggtcttatttccgcccttggtatatattcatgtttaatgaatttcctgttgactttaaaaggaatttctactataggctattttaaaagaattacctatttcaagcttttcctggcatgtggttaaatcacttcctttgaagaaacaatactcaacctttttttgaagttaaaatttgaatgcgaaattcaagcattgtattgattttaatggatcaatttatttttctgtcttcaacacaccaatctttatatctgtaatttctgattctgcttttataatttctaactatgtaaaccaatttcaaaagatttgaaaatggcatatccaatagatgaaatgttttctttgtaaattaatataaaccaaattctagatattgttgttatatttgatactaatactgagtctaatacaatagacctgatttttccataaactgggattgagtagaaaactactaaaagataacgttctgatgaaattatctgtggcagtaagtttagtgtgctaacatgctaaaaatgtttttcacatataagattttattgtattactggcactgtttatcacttgtatagatgtatttttattgaaataaactttttaaaaacttaaatatatttaaaggggaaatgtagtcttctatatcttttttttttcagtacacattaaatagtaaagtaaaaaggatcacagagttaaaagattactcaggtagccaagcatggtggctcacacctgtaatcccagcactttgggagtcagaggcgggcagatcacctaaggtcaggagtttgagaccagcctgaccaacatggtgaaacaccaactctactaaaaatacaaattagccgggtgtggtggcagatgcctgtaatcccagctacttgggaggctgaggcatgagaatctcttgaacctaggaggcggaggttgcagtgagccaagatcgagcaagattgtgccattgcactccagcctggacaacaggagtgaaactctgtctcaaaaataaataaataaataaatgaataaaataaaattacccaggaatcacttaaaattatctaaagtatcaccactgagttgatgggaaaaaatttgtgcattacaaaacttgccctttaatttgcaggggtttcaggttttaagtaggaatcatcaacaacatgatcaaaaattcttctgcttcattattttcaaattgtatacacagtgttctctatacagtgtattaatcattatagagtataattcagtatgctgcatttatattttagagcttttttttttaggggtagaggaagaggttggcattggctgctaggtgaggttgtaaatgaagaaacaatataacctcgttagtttgtcctattctcatggcatgaactttgtaataccttagagaaaaagagaaagttaaagctgatttcagcttaattctagatctcctccaaatggcattaaaatagtttataacgtggctggatataatagtattcatggtggtttgttatccaaatttgtagctattcttttaccaggtatttctgtcgctatttctcagtttctcacaacactgcaattcttctctacctttgttatttcagctgttttataaaggtttattttggaaatgtatattgactacagtttcttgtgccactctcacttagctctttgtggtaaaggtcacatttatttgaagttgtagactttatggctgagtagtacgtcaaagccagccagtgtgcattcccactacttccctgaccctgactttggccttcaatacctcttgcctgtggtttgaaattcttttctcccagtcttaggtattttctcactcttgttcatggcagccctgatcatgttttattctggccaaaagccttcaaagttctgccttttgtcaagacctctttatctttaccctctatttgctctaccatctgcactgtgcttatgttctcattcctccccctacttgatacaaactggacaatcactgcatccttaggagattttacctttgcgtttgctgtcctttcttctcttcgttgagttttcctaaaaaccaatataaatttatttgtctgtaaatatcgacactcttccagatccagctcacattttgcctctcaccttaagctgcttgggttctcttttaatcctttgcagacagagtgaatatctcctcttctccctgaattgccattgtacttcctgcgattttattttatttcattgtattttactgtgttgtagctagattgcaatctcagcacagaagaaaggcatgggttttagagtcaggtatatctagttttagatctgttccctttgtaactgccctgaacataggctgtgctgtggtacatattcttttatattctagggactccactctttgcatgcacagttgcagttggcaataaatgtttaaaggatgaataaccacttattcatgaaggactgttattttaatatttatttaaacaatatcctgaagaatcctcaatttttttgctgcccacagagaaatcacttccttctccaaaaagtgtgcagttaaggagtttgtgagtgcaaattgaatgaaaatgtgccattaaggagatatctgaagatatgtgtgtgtgtgtgtgtgtgtgtgtgtgtgtgtgtgtgtatgtgtgtacaaagttagggaaagggaagtttgcttttactatcactgttttcctattttttttttcagttttgtatgtgctcattaaatgtagtcatttagaactattatagctgtggtcacttatgaatcctaaggccaatttcaaatttttaagtggaggggattgctggcgtatcctctcaattttgctctctcctctatgatttaccttctgggcagcaagatactagacaagaaaaatgtcacaagtttgcaaataggctatgtgaaaagttttattaatttaaataattgtgtcatatagttaggctcctgaatatactaatttgcttttatgccttcttatattttcaaaaccatgtgcttagcatagcaaaatttagtgctagatatatttgtcttaaacttagtccaagggcctaatgagaggaataagaaaataaggatttaattataagacatcctaatgtctaaagaaggccctcagtcagaaccctcatgctactcatgcacagagatgtctgtgattactctgaccactcttcttgtgtttacttaggactaaatgagtaaatgactgaatgtcagcactattaattaaatttgttgtagagtctctgatgcccctgaatcattttccagggaacatgctgttactaagcctctaaaaataattgcttagtgaacatataaaatgcccataaacttttcaatgctctatcttcaagaagaataatattcagaagagccttcttttaaatgacaaatgaagatttttccctcccttattagatgcctgtacattttaagttgaactttaaagacattgaatatagtgacttaagaacctttaagtttttacttcagcttaagtatttaaacaatttaaattggtatttaagaaatatttaaaaagttaaatcaaatattaaataaattaaatatcaattttattataataccctcccttattagatgcatgtattatttcaagggttgaaatatcaattttatttagaagtgtaggctcattatgtttcaaatttgaggaaagacatgagttttcagattgacattacactctgagtaaaataaagataaatctaaatatagacacatcatgataaaactacagaacctaaggaattaggagatgatctcaaaggagagaaagacattatctacaaaggaagaagtatcaaaacacagaagtcagaagacattggtataatgtattcaagcactattagaaaacaactgtcaacctggaattgtatacacaagtagtctcattatagaatgagtgcaaaataaagatattttcagacacatacacacacacccacacccacacaaaagaagtgtaggcttatttctaatttactgaagtcaatcacaagtgtattggtgctaaatgaagctactgcataccgaaacatttattgatatatagtttccaaaactcagtgaagatatttgaatatttgtaaaagagattataccaaatcatgttgatagtctaatttgggagaatctggaccatccaagcttgccagaaatgtatgaggtcataacagtacttgatgaactccttagagaatgcaatgcaatttctgattatatttcagactagtggctttgaatataccagagttattaaaaggaggacaaataaaattttgctgttgttacttcatgccttgttcaatctcgtgttaagtctagccaactagaattacttaaagtttgatttgttgtttctgtcagaaaaaagatacgatattcgtgatttaagcaaaatatttttttctgatttgggtggtgataataaaacaaaacattctggtgaatttactttttcattattagtaattattatcctagctataattttttatgtttaatttataggaccactatggaaatttgtagaccggtagagccagtatattctaaagcttctcttggctttttatcctatctccctttgaggtagtttgactaatagggcagggaataaagagagaatggcagtaactctcatggggcttgactaggatagaatcactagccaaccttcttacttggcacattgacaccacttttatgtaaaggtgaattttagtctgaaaattatgtaatgagcataaatgtttatcagcacttaactcttcatagatccttgatttctgagcctctgaaccaatgcttttgttgccactcatttagttattattcttgtacgcattgttgcaagtgatagaacaatgtagcagtaatatattttccgtatccttaaaatatagttgcagaagaattgtgtttattactttctttgcagtattctactataccagagtgggtttttagtacttcctgactgctttaaatgatgattaaccctactcatcttctctgcttcatttttgttagcttattctttaaatctgttggatcagaacctagctcacctggtgggatacttgaggttttctatattttacattatgcatattaagtccagatctaatatttcattatacatactatctgtgtaagctttaagagtttaatgataaattaataacagatattttattattttgtacatctactattgaatatttgatactttactatctttaattattagcaaaatcctgcaaaaataagtgaaatgttttacagatttaaaaatgaggctaagaggattaaaatagtttgccttttagatagtaataccttccttattgggttaatgtgaggattaagatacatatctgaagcagctcacccaaagcctggcaccgagtagccccccaacaaatgaaaattgttgttgctgttgtgactcttatcagtgccaatgtctgagctagtggtatagctgtggttctgtctgatctgaatctaaaatctatgttgactatatttgataccttttgaatttaaattcattgaacacttgatatagttttatttattcttcttatgtagcagtgttctcaattatttcaaagaagtcgtgttaatgaccttctggaatacgtttccattattggctttagcttccaaagcagtccagtaatgattagggctgacatcatgtttcatactgatgacactcttcctagaagctctgcaacagatggtggcctttgtgtagactcagcacagttctcctggactatgctcctgactcagcagaattcagcagacagtctgtacaaggcatcggtctgtggtggagagacttatctggaaaactagcagggaaaaagatgctaactaaaatgggtcgagggctctagctgaactctattctctgtgtggcattttgtgtcagacttaaaaaccatatggccagaaagctctttcactgtagggccagttagcaaatagcctggtgtcagattctagataaagcacaagtttacattttgcattgagaacatttttatctgaggcctctgtgttttacaaatgcacatgtgaaggcaagatgcctactgtacagaacatgcaattgatgaatgccctagggaataagataaggagatgagattcctgtaccaacatagggctctttgtttcacaagttttcatcattttggacaggattatttgaatctggcaatagatggacaaggctctgctctgcttgtgcctgtaaattgggaattatttctttgtgacatatgggaacatttctttgggggaaaagagaagtgtgtttacttttctaatgctccttacaagtttccttgggactggtcagatgacaaaactgtcagtgacaggactgagactgtagaggctatttactatgaagttaatggaccacaggcttcagggctccttattttttcaggctgtgtccaagaccctgcatcttattcacatgaccatatgtaacatttgcaattaagatgatttaaacataatcaggttaaactgtgcacttctactcctatttgtcatatttcttttagtgtaaaaaatggtgttagagtggacatggacaattttgaattctggctaatgggatgctgagttagggatacatttattttgcacttagtagaatattttggtgtgagccatatgaaagtggcattttttgaggttgaaaatgatggagcactgacaatttcacatggccaacctaatatttatggtggttcaaaattagttcagtgtataatgaagttatttctgctgttctggtaaagaaatatctcccaggaaacttcctacttctcccactgcttccaaatgatcctacatgcccagagtgatgagtaaaagtacataccaagaggtcattttgtaatatgtatgtgtctgagagcatctggtaccaaaagcatttggagagagaggaaacaccaccatcaccaccactttgatctagaattggagagcaatcataataacatatctgattacctttcacaggaaaaggagtgtaataggatgaaaatacattgtaagatggctatgaggttatatttctagggttaagattagagcacatttcagaaaccttatagcaacttaatctctctatttccatttctctctatcttctctcaaccttgtttattcccatcttccctttcaggaaaatgaagacagtcagggatcatcaataaatgagattcgtctcttaatgaaactgggagtggatggggaagaccttttctagggatatcttctagcgtttttctacttctgtttctcttaatgccatattatcctggttgctattttgcctcgccaactgaggtggcctaggaggtgctactagaatcagcaaaaatatattgcttgctaattaattatccttcaacataaattcctcagttttcacaagtaaaacagatgtttgctcttctgccctatggttttatcttttcctttagttgcatcagctttggggagtctgagaagctgtaacagaataagtaatgtttttctgattactgcatacaatgagttctaaatgtcacaaataatttacaaaatcaaggaattgcagattcacctaatgtctgtttcttaaagagcttttctttaataaactcttgccagggggatggagtgtcctatgagaggccttacttggtttattcatgatgaatatgagtatacacgatgaatacttaaacatttaatactatcttgccttttggaatataacacataaacataccttcttttccactttttagaagtcagaagcatctatgatacggatcaaacatcatgaatcaactcataaatcacttgcaatgcaaaagggtctcgggacactcactgcatttattctctgtatttattctcactgtatttattctctcagcttctttttcacaggtggtctcaggctgtctgcttccctccttcaatcatcagtatttttctcaaggcagccctctctattggactctttttttttttgagtttctgttatcttctcttcctcttcttccttcaggctggaggaggcaatagcactattattaccatgccaatggttctatattttacgttctggttttattacatccctcttgtacccttgtaaacagttctttattcaactgcactgtttgtctgaatttaatgcagcacccaattcctgggatcctgactgataaggatgctagtctaggaataggtagtctaggaataggtttgacattatcagtgacatgtgaagtaggtgaagaaaaaagccatggaggtgtgtgggggaaagaaccatctgcatagaaaaacagtagctttattcttggaatgttggattgacaatgaagtggactgggtggctgaaatgaagtgggagagaagtaggaaattaagtcagagaggtagtagaatgaggtgggaagatcacagagtgcctttatagggcatatactcagaatgagattagaaattagcggaggtgatgataagcttataatgtgtcacttttgctactatttggagaataatctctatggggacaaagatggaagcagggaggccagttaggagtctgttgagaaaggcaatggtgattgtagaagcaaagatagtgagaagcgatggggttcgtgatgtattttggcaagatggggacaggatttgctgatggatataggatattaagagaggaatctagaattatgccaagtttagcaactgggtggatggatctgtcttttctgataggagaatagtcattggaggaagagtttagggagaaagatcaggaatttgattttgtacctgttaactttgagatgcgccaaagtagttgtatttaggcagttcatgggaaatgtgtaggctagagatacaaattgaggagtcgtcatcatataggtagtatttaaagttatgaaacatactcaaattacctaggctgttgattctcaaattatttagttggatatttgtaaatatagttttcactgtaaatatatggtggttaggtcatttcagtcagcatttaaaataattcttaagattaggtaagtattttataaaaataaacttatctattttataattagcaagtatactacctaagtacctataaataggtatatccataaaatactgacatgtctatgtaaactcaggtagacatataaagtatgtataacacaagaactatgtttgaaaatattatttgtctttttggtgggcacttttaaatgtcagaaagtgagagtaatcactgattttcctgccaaacagaattaaattacaactctgagaggagaacataaggagtgttattgcagctatccttgaaatgtcagactgcttttaaaatgtgattattttaagccctttgtttacactgtggcatctttatatgtaaaaaaatttaaacacttgggcattctgtgatttatgtctaacttttagtattttgaataaaaggcaatttgcaatagtaaagaaatctttattaccaaaaacagtagactaggagtcagaagtgtggatttctagaatattttgtcaccaacaagccatgtaaatttataatactgaacttctctgggcttcgtattctttgtttgaaaatgaaaaggttcatctggattactggtgtttccacagttccatagatgtctctctctcagctcccccgacaatgggtcaggtatgccaaagatgcctgggtccttcactctgtttcaaccagagccttgagcttttacttgttctttgttagtgctactaagaagatgttttgaaccacaagatcaccagttaaatggtcttaatcttgtgtaggaaaaaaaagtttcaattagttatgtaccaagtttttgttagatttgagagctgccttatgactaaagcactccctacaaaacatatcccgctaatttcacaaccatcttcccaggtaactattctttttgttttctttttctttttgtctctgaagtataattgagccttagcattctttaattatagagtcttaggatcttacagttgagacaggccttagaaataatctctttcagcctctttcctgatacagaatgaacaccacatccctgagactagttatccaaaatctatttgcagggtgccaggggctcatcaactgggatggtaatccattccattttgtaatagcttttatgttttcttttgtgcagccaaaataaatatctttcaaacccctactttttggccattttactgtagtgatttgaaaacactatctgtggttagtggctctaaatttactatacataagaatcacttagagcattaagttgaatattccagaactccatatccaaagattatttcaatagatcagggatggagttcagcaaatttacattttttgcaaacatttgatttgattataaatttagattgttattataacaacacataatcttgtggattggaaaattctgttatagtttgtataatgtgattccattttggtatgtaatgacatttatgtatttaaaaaatccatttaggaggatatcctcaaaatgttatcaatgcttgattatttctgattgttgggaaaatggacaaattatacttttacttatttttacattcctaatgtaaagataatgatttctacaattattacatataacttttatcattaaaatatttaatgggcaacttatatttttacttgtcttcatatcttgtttctgtaatgactatattgttattaaaatgaaaaaaatttaatgagtaatttatctccccactacttatcataaagatgattttgtagaaggtagagatttgcaaggatgacagagatgtagctcatacggcaacattcctattgatactgagtgttttcagggtacattagagtaagggtccttgggtacaaaattctgactcttccaatattctctaagggaggatgatgatagcattaatagtcatctcattattcagtacaaggccattccatcggtcatttctttattcttttttttttttttttttgagacagttttgctctgtcatccaggctggagtgcagcggcacaatctcggctcactgcaacctccacctcccaggtgcaagccattctcctgcctcagcctcccgagtagctgggactacaggcatgtgccaccacacctggctaatttttgtatttttagtagagacgaggtttcgccatgttggccaggctggtcttgaactcctgaccttaagtgacacctgccttgggctctgaaagtgctgggattacaggcatgagccatcgtgccaaatctcatttattcttttaacaaacacttgtgttccaggatctgtgccagtcatgagagccagaaagaaaaacctgtgtacctaattcctactatagcaggggaagaaaaagtggcataaataacagatgtgctgtctatgcctgggaagctctggggtggtttcactgcagagtggctgaatgaggggaatcttgaaagtgaggatcagtcttatccaagcagatgtgggatgggagagactttttctttgaaaggccctatgcaaagctacagaaatgtgacctagtgtgttataaattcagaactgtgagtaatttgatatggttagagcactgcatacccatagggaatttcatgaggtaactttgggtggaaaagcaggatctcaattttgcggtaacttatatgccattttaaagagcttggataagtagcttcgtcagcttttgtattgtggcagcagtatggcaggtatacactgagtgtggtggctcatgcctgtaatcccagcagttttgggaggacatggctggcggattgcctgaacccaggagctccagaccagcctaggcaatatagtgagacctcgtctctacaaaaaataaaaacattagcggggcatggtggtgtgtgcctgcagccccagctattagggaggctgaggtgggagcattgcttgaacccaggagactgaggcttacagtgagccaagatcatgccactgcactccagcatgggtgacagggagagaccttgtctaaaaaaaaaaaaaaatttggcaggtatactgaagggaatggctacagatagaaagacagattagaagactattctaatactaagaagcattttgaggcaagcgttattaaggggttgaaaatagtattccagatattcaagcaggtgacaatattttgggcaaatatctcttactaagtaagaggcaattggtttaggcaagccaggattaattctctttgtgttttttgtttctaactcaaagtaggtagtaattatgtacagcatctcttaatctgtaaactcttatcttctcttttctaatcaccccaagaaactattaatcttagcttaaggaaaataaaggataactttaacttccagtgtctgttaaaaggagagttcattttgtactccttagggttgaagaagttgtatgttaagaaaagccaatttagaagacatgtaattttacaattactagtgttctcttacttgaattttaatgacaatactaccactctgaattttgttatgtgctttgccctcaagcctgtgaacagcagtttgaaaccatatgattctctgagatctctccttaagaccagctgcagttcggatgtgatcactcattgttctataataagcagcttagacccaactagccaccctttggactgagaccatacaaagctgtttctgtcccacataggcagggactccgtgcactccaggctcagctgcagggcctgctgaattaatcaaagggttcttagaccacattccctaaagactagggaatttctgtagtgactccaccccaacgctgaactccttgccctttttaaatgttcttctgacagctggggacctgagagcagtctaactcccagaagataactttggaagagtgttcccaaaagtttattgaggagaaatgtagaattacatgctcttttgcctgtcagaatttatgaaaaaagttaatttgcaattaataacgttggtaagcattctagaatataataggcactgcatttagtgccttactttcactatgtcacttagttccggtaacaccttatcagatacttataattatttctgttttacaaaggaggaaatggagagcctactgggatatggatgtctgacaacttaggacaagtggttctcaactctggctacacattgaaaccacctgaaaagcttttttaaaattcagacttctgggtctatagcagataaatttgattaaaatctctgggggtgtggtccatgtataagagttttaaaacaaaggaagccttctcaggttgattcccatttgcagctaggattgacaagtctagtcctgatgtgtctgagactcataccttatcaaatcatggtccctcgctcagcagcatttgtatcaggtagaaatccagagtattaggactgtccatgaccgactatatcaaaatccaaattgtaaacagatctctaggcaactatttgtattgcctttgcaacttttctgtaattccaaagctattataaaattaaaattgtttattaggggaataaaagatcatatttgggatagaaaggtcaatacctttcctccagaaactctgtctagcaagagagaaacttattaaaaggaatctgctacaagttgtgatggaaataatgcaaaatgtgctgtcatggtataggaggaaatgaaaaacgctgcttggaggaattagagaaaattgccaaaggaaggtgacttgaaggcacttcaggcacagagaaagatatacggaacaatttttaaaagagaagttgctgatataaaaggaatttaaaaaggaacataagcctttgctttgattaaaatgtaatgtttaatacacatgtgtatatttttgatatatcataaactgtaactgaaaattgagaattagtgccagactagaaaggtaatataataattaatggaagagtttatttctcttttctggggaaagcagagtaaattaattatttataacattaacacttttggcaggggggaagagacttttttgattaattctctcttcttgtggctgttgtgacccttttctctcttgattcatcagtttgttgtatatgccatgcttaaattctctactgggccctttcagatgttttctttgcatttacaaagaacttctgagcatatccaacccttttaatcctggttacctcatcttcaccctacagctaggtttctgctcagaatcgcttctaaaaagcccttgctaattatttgcagtgtggattgggtaccattcttttgggtccccgtagcatcctgtatacatcacattgctgcaaattttcgttttctctgtttctgtcattaactaataagtaccttgaaggcaagggctattttcagtgacttccgtgtctatagtactttgcataggatttgacgcaaaaaaatgctttgaaataatcccttcaagtgacaacaaaagcctatttttgcccttagtttatagtaacaagataatctttggagatggcaattaaagattgaaatgcagttagcattaggagctagcaagaaacttagagacttcaacttgtatgtaacacatgcctggcataaagcagaattttggttgtgtgaaagtgggaacactctcattttatacatgagggctttctgatttagattatgttacagatatgtctcccttagcatattattaagagaatataaactcagatatggatatcattgttcataaattaataataattgtataccttccaattatgaaatacctatgcatgttgtgttataaagtgctctttacatatatgattatatttaattctctgaaaaatcctaagcaggttatattagattggggggcacagacttggacttagaaatgtataattataaaacgcatgttttttccctagtcaatgtcctttctgctctgccctgctgcctttctttaagaagcagctgaaacttctgatatttttctcttccaggagattgcgtggttgggaatcaagaacttgccctttgatcactaatttactgtgtgattatatacaaatcactgagcctctctttctcagtctacatgtttgtgaaatgggcctattgaactatatcatgaatttattcttatgcaacatatatttgaaagcctgctatgagccagatactgttctaggtgctgaagatacagcatcaaaaaggacagacaagatccctaatctcacagagctttcattatggcatatcaggctgaaaataaacatattaaataaaatcatgtagtgattaacatcatgaagcagataaatggaaaaacaaggaagaatgtggctggagtgtcctggaatgtggtgggagacatccatggatgaggtggtctggaaagtcttcactgaagaaataacatttggtatctgagaacaaagcaatagttagcatgaatatatgtgggcatgtagatttgaaggctgaaggaggctcaaggctagaaattctaaggctataaaagttttgcttataggaggaccactaaaagactagtgtagctggtgggaaaagtggcaggagacaaggtgagaagttggcaggtctagatcatggacttatagtcaatggtttcaggctgtttctcaaacaccagtgtgcagatactctagggcaatccatgataattttttcatatctttgatgcctttgttacctttgacacctttgataattccttccaactctgtgatacctttcatggttttagaaaatctttccttgtgagtagtttcccagaatagaaaccagaaacttgcttctcctataaatatatctgtatctatatctatatctatatctatatctatatctatatctatatctatatctatctatatatttttttctttccaaagtcttgttctgtcatccaggctggagtgcaatggtaagatcttggctcactgcaacctctgcctcccggattcaagtgattcttctttctcagcctcctgagtagctgggattacaggcatgcgccaccacgcccagctagtttttgtatttttagtagagatgggggtttcatcatgttgaccaggctggtcacgaaatcctgacctcaagtgatccacccaccttggcctcccaaaatgctgggattacagatgtgagccaccgcgcccggccctccaacttcttttgcatctagaatgcaggcatatgacccaggctctgtcagtgagctacaaataggtacctaacactttgaactggaaattagtgacaaaaaacaaggcccatgcaataaatccggtgatgatagtggaagctacactttgttaccagggaaagccatggtagagcttataaaatagtgtgttgtacccagatcttggttagcaaagtagactttggtgagtgtgcctggtgatggtagtcgtgctgagctcacagaaccagctttatattgttatttcagtctattcctgactgcacagcctggttctctggccaccttggaatttctataagtctgtaatatccttccataaatttcttttttacttaaattaactagggtccatttacattgtttgtgagtaagaactctgtgccaaagccttgaacttgaaaggaagggacagggagatttcctgtctgtgtccgagaagcactagatccatgagattaattccaactctaaattcttgggctaatttctggacaaaaatgaactggagatgtaaattctgcttatttcaaagtcctgttttccgtatttgtattttcaaaattagtatttgtaattcctttaattataaattaaattcctttaatttaaagagcaggttcttgtacaaagatactaccttccctctagatttaagatcttactaggctcctcaatatatcattgatatatcattgatgaacaattcctctctgagatcacccctcattggtacaactgaagtatttaattattaaccacaatcttaagaatatatttgtttttggggaaaacaatttttttttttttttttgagtcagagtctcactctgtctcccaggctggagtgctgtggtgagaccagagctcactgcagtctccatctcccagggctcactgcagtctccatctcccaggctcaagtgatcctcccacttcagcctcccaagtagccggaactacaagtgcatcccaccacacccagctaatttctaagttttttgtagtgacggggtcttgctctgttgccagggctggtcttgaactcctaggctcaagcaaccctcccacctcggcccttccaaagtgctgggattacaagtgtgagccaccatgcctacacttggagaaatttttgatgtctgtttagtaataatactttcaataaaatatgtcatcagcattttatgaagtcagctatattgcatctgagaaacggcttctaaaatttatgtgtttcttagtagctgtacaagagtaaggtgaaaatgtgtttataattttcaccactcccatctgtccagtactagtgccaggctaatctcagaagaattgttaaaaaggtagctacttctctaaaatgactttccattttcacctctttggctacccttccactctgtgtggaagttctgaatcttcaccaactactgacagttttatttcctagaagttattcttataattgtagttaagtttttcttttttattgacatgttgggtacaatgctctttatgatgactactagcaaagaaaatccatcttccagtgcctctgtaggtaaaaatggtgattgactcctagaaatagttagcttattgtttaccttgatgaaaattgcttaatttttacaaatagaagacatgaggtactcttatttttcttgtttaaaggccagttttctatgataccagtatacacatttaaaagcagctcactttgaatatcagtttaaaagcagatatttgacttgaaatgtctttgtgtgagatgttatcattagacttatgcagatttaggcttggctttgcttgtgaattatcagagactttctgtttagatgatgctttgtcagtatgtttttggtgtttcaagtttatagtcacttgagcattatcacctagggatattctctttgtcattagatgggttttagagatgctttggatggaaaattctcaccctagaacatctttttggctgtcttggtttcccccttttgttttaagacatggtatacatttttaattatacattacttaaaaactaaggttggaaatgcacatttgttgtctcattggggaagttttgagaaattgaagttaaatcctcagcatttgcaaaagaataccatatttcctgcatagcctgtagaaccattagccaattaaacctgttaaactaaggtttcaaaataaccatcattctaggttatgggtacatgaaggtttactatgttttcctgtctgctttgtcttttgatatatttgattttctacataataaaagcttaaaaagaaaacattatatgttagtttaatgtaaccctgtgacctaggcaattcactgggcttctttgagcttcagcatccttatttgtaaaataggaatcactgcctcatttataggattaggattttatcagaaaatgaatgctctagtgttccaatgtggactttaaagtactgttcacttgttgagtattaattaaaaaggactttgtgcaagtgtcactcaatatggatgaacctaaaaagaacgagagagatttgtataattgttttttgtattaaaataatgtaggatcatagaatctaagagaggggatggactacctttaggaggtggtcacttacgaaatgatgaaatgaaagtaagcataacttggggcaaggaacccttcagtttctgtgttagagaagggaatagtgaacttagttaaatatagatgatgttaggtcattttcatattgctataaagaaatacctgagactgggtaatttatcaataaaacaggtttaattggctaatggttctgcagactatgcaggaaatatggtactggtgagacaggaaatttttcttgaccccttcacaggccttgcaacaggggtgccttgcttactcagcccatagctctctacccctcgcgggagggggagatgcagatgagtgggtgcaggagttggggcaagtgcttctgggcaccagcaggagcaaaactctgtgtgggtctgcagggcagcatctgttggggagtactcatgacccctgaagcctcagagggcttgtgttgccatgtgctcttttagctttgctgtcgtggatgacttaagtgttaaatagctcagtaggccctctgtctttttgtgtgaggtgattgctttctgctagtgagggcagagggtaagtatgacagcctttagcatcagcacccgtcacacccgagctctttttcggcatccgggaaaaatcagatcgcacaaacgaattgaagggtggtgaatgcagaggactttattgcccatggaggtggcactcagtgggaaggggagttggaaaggggagggagcgggaaagtattcttcccgtgaagaacagtcatttctggctggactgaactctgaagtcacgccatcaagccgtctctctgaaatcaatctgcttctctccgacattcagctgtttcttcttttctcctcttctctgctctctgccagtggagcctggggtttttatgggtacaggataggggatgggacaggtcaggggtggttttggaaaaggcagcttttgaatgggaaaacaggaatgcatgttctcactttgggctgtggttccgggcttgagaggtggggcttcaccagggaccctgaccttttctgcctagaatttctttgcctcctgttcctatcactggcatctacttggcttccggggagacctcagggagcttttactcatggtagaaggtgaagcaggagcaggcacatcgcatggtgaaagcaggagcaaaagacagagaggatgggaaggtgccgcacacttctaaacagccagatctcatgagaactcactgtcacagcacagtgccaaggggatgatgctaaaccattcatgagaaatccactcctgtcatccaatcacctcccacaaggctccacctccaatattggggattataattcaacatgagattgagatgggacagttatcatcataaaggataactgtttctttgttgggggacatccttgatactgtcttatttaataccagttttgctgcctgctggagaaaaaagactagactggcttctccgagagtctcaggggaatttatatctgctataaaggatcgattttcagacaatacattatgaaaacttaattctaactaatagcagataacatttattcagagcttactgtgtgccaagaaatgtacagtttttaatataaattatcacatttctttctcaaaagtacataattaaagattgcttttttttcattacatggatgagataggaaattatggctcagagaggttaatactttgcctaaagtcataaaactaaaaaagtgatagaactaagaatagaaattgctagtctaactctacaacttgtggtttgtattataccatattgggctctttacagcaattaattcagtctaggcacttaactttttttgttttcttacctctttctatacactcctttagtgtgctatatgagcagatatatttgagattttattataacagtcctaaaagtccatttttagaagtagaaagaacataaacaaaaatatatcaatacatgtaagtgattaaatattgggttagtaatggctagaagtgctataacaaataccatacacttggtggctgaaagcagcagacatttattctctcacagttctggaggccggaagttcaaaatcagtggttgggttggtttggcagggttggtttcttctggaggctctgagggaaaatctgtttcacgagtctctcctagcccttggtggtggctggtagtccttggcacatggctgcatgactctaatctttgtctataccttcacatggttttcctccatgtctctttgtgtctcagatctctccttttataaggacactgatcatcactggatttagggcctaccctaaatccaggatgattttatctgaatttttttaaccttatgaagtacatctacaaagagactatttccagataaggtcacattcacagataccgggggttaggacttggacatatcttttggggaccactatttttaaaccatactattttgagcatttgtattaaagaaacagatgagagaatacaatacaaacttgggtttcatatcatctcaattcacagattacttagttttaagtgtgttttatagaagaatgttattgtatgtacattatcttaatgccacagctatcctccaaagattttagacttaaatctcattttcgttttgctacttctctagtaaaaatgtgtgctgctctatatctttctgttattcccaggatatatactattacagatgtacttttagttcctcatcacttgaaaatttgatatttgaaatttcttctaagggactctaaatggtaaaaatataacacatatttcagtcctaaaacagttacgtagactgcttcatgatataaaatgctactactaaatttagtgaagagataatgaattcaaaagattgtcatggcaaagaaaatgtaataatatttggtgattgactaaaattggaagcaccttagagagaaaagacaaagacacactaaagttgacatcagacaaatctggatgttattctcagcattttgcaagttctgttcctctacagagtggaataggaaaaaaaaaacatagaataaaatgcatggaagggtgaccacagcctgttgattcttaatagccttggagaggataattcatgaagaaatgtggacagcaaattttgaaagtgcttttagatataaaaataagaaaaccaagaaggataggtgatctatacatacttaaagcaatcaatactttttttttacacaaaattaaaatgtttgattttagacagtgtagtggcacattagggaggcgatgttaactgaacaataaaagcttgtagtgtacagttagagtagacgtcctcttatctgatagcatcgtgactatatagtttataaggtaatagtaaaagatccttaaagcgaattacaaaaagacgcatatctacttaaactattttattttaactgaaagcttatacagatgtatttacctgtgaaacttttcttctaaattaaggcttttctttgagcatgattctgctgattgcagttctacaaagactttcttatgtgacaaatacccattacagataatctcattatttcctcaaagggtaggagaacttagggacacctatactgtgatctaagttcaaatttcttctatgttttaataatttcctctcaactttttatttttattttttatttttgagacagagtctcgttctgtcacccagacgggagggagtgtagtggcgtgatctcggctcactacaaccttcacctcccaggttcaagcaattctcctgcctcagcctctcaaatagcaaatagctgggactgtgggcatgtgccaccatgccggctaatttctgtgtttttagtagagattgggtttcaccatgttggccaggctggcctcgaactcccgacctcaagtgagcccccgcctcagcctcccaaagtgctaggattacaggcatgagccaccacgcctggccctctcaaccttttatagctgttttgcacatatataacgtggcagtagggagtaaatacctgactaaattgtgatttgattagaaagaaggaatgaggatatatgcttgtttggcagccaactgtttttagtacagtaagcatatgaaagaattagttgaagacaactgcttgaatataaattgggcaaagtctagtacctatgagtgtgcagatagctatgggcaccagtaggtgtggttgacacttcgatggagagaatcagtctggtgagtggtgagctggttaagtggaactctgttttgagaacatctattctaattgtgctttaaaagtgttgcaaaaagctcacataaaattcgaggggaaaggatttgcagagccggttagatttcagcaaacttttaaggacaagatagtagagagatttatgataagaaggcgagtatttgctttatgggcttgagaaattattaattcctggcatttgtatcatagactgagagatgacgggagagacatttccagaattgatttcagaacatgagagagcatttctgtgaccactgggtcatccagttgtgtggctattcttgggtggtcttttccttggtgaccattctcatctcacttgagcacaggccagagactgattgtagatgtgacactcttggattttttaaaactgtactcattgcaaatacacacatgcacatacctatgtacacacagaaacatatacacacatatatgtacatatacacacatttagttaaagatcaaattatttgaacagttatatctttcaaaataaatagatatgtcttgcaatgtacttttttaaaaaaagtatagctttgttattttaaaacaattaggatcttattttcatgagtagtaaattttatgccagaactctgggcaattcttataaatatctgccttctttaaaacctcagagtatgtacttcaggctctgacaaaggtacactttttgctaactaagtgtggttttgaaaaattatcttcttttttgttttcatgaccagtttgtagagctagctgtgaagcagatggaccccctcctctccatgcagttacgcaagaccgtttccctaaatcattagcaacacaccactctcctaagcgttttgcactatctgccagttgctcctgctgtcacaacagaacacttcaaatggttctcaagatcatttttactttactgattttctcaaatcctctaacaagcttcactacaccttaggtaccctgttgcatttcacaggagactatgagaggcagctgtctcagaggacaagaaacaggatagaatgtacccaggaagacaggggaacaattttttaaaaaagaaataataaccatggtcaagtgctgaaaggttaagtaaaggagtgattaaatatgatcattggattgagagtttgagggttattgttgcctgttgaaaatagttttagctgggtggtgaatataaagtaagttgctgtggtttcaccagtatgtatgaaatgaggaaatgtgaatattgtgtgtgggccactctttcaagaaggctagctgtgaatggaaagaggcaggatgaagataagatttcatttaagattaaaaagatgcaagtgcatttataaagaagtccataaagaggggtagaagtttagaagagaggagaaaatgatgtattttggtcttattccctcttccttaaagtgttcgtattcattcattcaaatacttattaaacaataacccctaatatttcttgcatatactgaatgtgtcactctgtctgatgttatgggaagaggactataaggtcttattcatgctctttggaatttatagtttaatgccataacacaaaatgtgaatagggatcattcctgctttgagcatattctttagcagtgtttaatatggcctatttttatggagagtcatgatttaatagacctatctggataaatcacagagtggatattccttttaacctcgacaccaaaaccagaagtaattcctgccttacaggctgtagtcctaagcagtgttttgtcaggcttctattaagatgatatggcttaacccagggtagggttaaatccatgtaatgatcagttgtattataataggatgttggcttgagcccaaaaagaactctccaaggcatagcagaaatctccgggttaatgagatcccctgatgagtcaagtaatgcctccaaatgcttattacagtagttgtttagtggcttctagacttaagtgtaaacaaatttttaatgaaggctaataacagagtctttaagaaaacaaacaagaaaaggtttttagattttttacaacaataatctctttttttttctttcttttcttctttttctttttgagacggagtcttgctctgttgcccaggctggagtgcagtggtgcgatctcgggtcactacaagctccgcctcctgggttcacgccattctcctgcctcagcctcccgagtaactgggactacaggcgccggccaccacgcccggctaattttttgtatttatccatggtgagtatttgataaatcatagtataaaaattgttttacttcccagcactttgggaggctgaggcgggcgaatcatgaggtcaagagattgagaacatcctggccaacttggtgaaaccccgtctcaactaaaaatacaaaaattagctgggcgtggtggcaggcgcctgtaatcccaactactcaggaggctgagacaggagaatagctggaacccgggaggcagagcttgcagtgagccgagatcgtgccactgtactccagcctggtgacagagaaagactccgtctcaaaaaaaaaaaaaaattgttttgcttttagagagtgcattgttctttacagctgataaagcactgcaataagcattattgctctcgattcacaacatcactgatccataggcagaggaggtattgctattattttatcacaaataaggaaattgggactcagaaaaattagtagcaatagctgcaggttgagggcttttgcaccaggcatagtgttaagaaatttactctatgctgtagaatttattattaactggattttgtggttgagaaaattgaaaagaagttaagtaacttattcaagtgtatgtgacaggtaagtgacagccatagcacaaacccgggaagatggacccaacagcactctgagctcctaatcgtaatgctttgctgcctttttagggtttccacacatgagttgttgttgctgtttttccttcttctctgggtcttctaataaaacttctaataaaaataaactgtcagaaacaatgcatttattatgtaatatagttatctaaatgttcttcaaaaagtccaaaaaagtcagtgacttaactatatattaagtcagcttaatatatagtcatgcttttaattagcacacgtgtagtttcagcttctagtcagtgactatctcaaagcatttttttttttttttttgagacagggtcttgctctgtcacccaggctggagtgctgtagtgtgatcatggctcactgcaaccttaacttcccaggctcaagtgatcctcccacctcatactcttgaataattgggactacaggcacatgccaccacgcccaactaatttctttttctattttttgtagagatggcattttgccatgttgcccagactattctagaattcctgatctcaagcagtctgcccacctgggactttaaaagccctgggattccaggcatgagccaccatgcctggcctcaaagcatttttgtttgttttaattgaagaattaacagtcattatctgctgaaatgaattatggaacttattatcaactgaagccagcttgtgtttattttcctatgaaaatattctagatgtagtagatgtcaaagaaataaaattcagtgcggaagtaacttattgtgaaacttttgagaaactcatgaatttataaagcaattgaaaaacgtgttattcaaaatatttattataatgagacttaattgatataataggagatatattaatgttacatggcaatttctctgatactattttaaaatatatttaagaaaaattctaaacacattgttgaataataatctgcttttaatagattcagtgtcagacccggaatatcaggaagttatctggtcaaacctgtaactattaactgaagcactggcctttttactgcctttatcaactaacagtggtaacactgaaatatgtcatccatccagtaattgctggagtatcatatgaatcttgcctcatgatttgaatgtagtatgttgctgatattactcagtgttcctgtagattaaacatatatttatgaaaacaccaattcctctcccatgaagatgggtataaggaggaagtgttagataaaagcatagtcttgaatttgttttctagttgcatatctgaaacaaacaagcagaatatcacgatactgaaaggtgaaaatgaagagttacagtgttttattttgaaataattatcatttcataagagtttcaaaaatacaagagaagtcccatacactcatcacccagcttctccagtggtaacatcttacctgactgtagtactgttgagggacttgagcatctgtggattttggtatctgtaggggggccctggaaccagtccccctccgatatcgaaggatgaccgtactttatcttctatcagtaaatgatctaaagcaatagttgcctaagtatgaaccgattttgcaaacattgaaaagtaatacctttttctcaatagtagatggaaattattgaaaccttctgacatatcaaaaaattgaatattaaaatctatttcaaaaagaaaactcattcacatttcatcttaaaacacagattaacccggaatgcattcaaagttttgttatttttttaaacttccacaatccaagcaatgtctctacaaatgcatcattttaatgtatcatgttctgtttatgcattcattggttgacaggcatttgggttgtttccacagtttgtctattttgaaatatgctgctctgaacatttgtatacaagttttttatggacacagtttctcttgggtatgaaccttggagtggaattactgggtcatatggtaactctatgtttaatattttgagggcctgtcaaactgtttcccaaagtggctgcagtattttacaatcctatcaacaatatatgagggttccaatttcttttcatgcttgccaatacttgttaatgtgttgtaattttagccatcctagtgggtgtgtagtggcatctctttgtggctttgatttgcatttctctgatggctaatgatattggatatcttttcatgtgcttattaatcatctgtatatcttctttagagaaatgtgtactcagatattttgctcagtttttaattgagttgtctttttattgttgagttgttctctatcagatgtatgatttgcaaatattttctgcaattctgtggattgtcttcactttcttgatgtggtcctgtgaaacaaaacttttatattttgatgaaaatatttgatgatgtatatattttattttattgtttttctgtttgatttcatatgtgggaaactattgcctaaatcaagatcatgaaaattatggctatgtcttcttctaagagttttacagttgtagctgtttcagtaagctctataaactattgtcagtgaaattttgtgtataatatgacatagggggtccaacttcattattttacatctggatccccagttgtgccagcaccatttgtttaaaagactattatttccccaatgatttgtcttggcacctttgcaaaaaatcaattggctatacatataagggtttatttctggattttcaattctactccattgatgtataggcctagatttatgccaggaccacactgtcttaattactttagctttgtagtacattttaaaattgggaagcatatcttccaactttttttagtattattttgtccattctgggttccttgtatttctatatgaattttgggatcagattatcaatttcttcaagaaaggcagctgaaattttgataaggattgcattagatctgtaggttaagttggaaaatattgccattttaacaatattaagtctacagtgtataagcctagggtatatttgccagttcttctctaatttctttcaacaatgtgtttttagttttcagtgaacacatttcgcacttttttgttacatttattttatgtagtttcttcttcatgttattataaatggaatggtttccttaattttattttcaaattgttaactgcctgtgtgtagaaatataactgatttttatatatacattttactgaactcgtttattagttgtcataggtttctttattgtttttactggaatttctatatatgggatcttgtcatctgtgaatagagatagttatagttcctccttttcaatgtggatggctttttttttcttaactaaatttgtaggttcaaattttacaatataacaagtttaattgtaacaaatttttgaaaaacatgattatattaattttggtatctgttccaatacacattttctgtacaccagtagatgaacctggagagcaaatcattctcattttgtaacgtagatgtcagcaaatatttattgaatgcaacattatttccaggaatgtgctaggcattgtagagtttagaaagaaaatgagctttgtttataaacttaatttcatagagaagccaagtctcaacatgcttgaaatagctccaaggaaaatatagtactgaatacaaatttggtggatattggggaaactaatatgatgtttcagaccaatgtaagtattaggactatggaaaaggcagaaaatggccttattcttttaaaaaatggttggaatttgacaattagctcttagaaaaataattcagaggatggaatatagtttgagtaggacttaaaaaaagaagactaattagaagtattttttttattaggcagatataaagtggaaagtttaattttaatgaaaatagaaaaaagatgaggagagaacttttgagggacaaaaaataagacttgatgaaagaggattatgacagaattaagggaagggaaagagaggtcctatgacttgttcaatgtcccaaagctatgagtgacagaaataggacttaaaataacgcttctgacttcaaaccctgtgtttataccatgctgcatttcaggagtaactatgaggggtagtaggctttaatacgtccccccaaatttcaagtcgcctaccattgatccaactcatgttcctaagtaggaaaaatgttaaatttttcactgaagtgcaccttatagcacagtaatgtaaactcttgatccatgcattctagaggttatagccaaggatgttcatgataagtaggaaaaaagagctatatttatattaaaaatttacatgaatgtattccaatctataatatgaaacttatacattcattagctttatgagaccatgttacatcaatttgaacatccaaatgtaatcatactgcaggagcaattacaacttagtagtcatatcatgctcttcctcaatcatttaatgtgagaattcctgtacatacttctcgtattaaatttcttcatttattcagtaaatatttgcttcatatttactccattccaagccccacgagaagaaattatggctttgttaaataaagaaggcagcttgcttcttatactagctaagtttctcttaactatcccatttttttttgtctggcatgtatccctgtttgccagagaaaatctgagtttgcactagttgttctggaaccctgtcaagttagctcacttttcactttcagatgtgaaccaatttgaatgataaattgcatcgtcacctgtaatggctaattttatgtgtcagcttgactaggtcacggtgtgcctagacatttggtcaaatgttattctggatgtttctgtgagggtgtgaggatgagacatttgaattgaataaagctgattgccctctctaatgtgggtgggcctcgttcaatcaactggagatttgaatataacaaaaaggttgagtgagatggaatttcttctgcctagctgcatgagctggaacactggtcttttctggccttcagacttggactgatgtcttactggctattcttggatcttgagcctataggattttcaactagaacttactccattggctttcctgattctcaggcctttgtactcagactgaaactacgccaggttgttgactgtagatcttggcatttcttagcttccgtcattgcatgagcccatttgcccattccttaaaatttttctctctctctttttctcttttgctcattcacttgttcttgctctctttctctctctctctctctcacacacacacacacacacacacacacacacggttctgtttcttggagaaccctgactaaataacagtcatacagcttataatacatttaaacttatgtgtatgtttcagtaagatttcaatttgaatacatatcttcagtcttcagcctcactattgaggaactgaaataggaaaatgttaagtatataaatgccaaaattctagattcattatacattgaacttccaagaaaatgatgcaaagtagaggtaaagaagtttgctaattcataaaacaagatgacattgatgaagcacttaaacatatttatatatttataatatatttctactttaaaccattaaataaagtcattttccctattgaagttgatcggtaaggttttggcagaaacatgagctaagtttgtatgcaaaaacttatgataaactataaacctggaaaattcatgggataataaataagtaggtatacaatggcaaagtaacacattctttgagtatttaccatctggcaaatgctttatgaggttctttatatgaattattttaggaaaagacttggtagggataaggaaaacaaatctgtagtagaaaatactaaataaaaaatgaaagctgacatttaccaagtgctcactacatgccaggcactgttctaaattctttatgtgtactaactcgtttatcctcacaacaggttatgatgatcttattttaaccttacgactgaacaaaatgagacacagagttgttagttaacttgcaaggccgctctctgaaaagaatgtcttggtggagccactctactccattttccctgagaaatcattgctgtgtgctgcccataggggcctgagctgaagctacacattgcctctgaggaaacagtgctttggcagagctactccatctacccattgtagtcactgtgccagagctcaggtagcaccgtacatcccagaaaaatgatgccttggctgcctagagcagtcaccgctgcctgtgcatgagctgaagcagtatcctggcccctgggaaaacagtatcttgaatgcccagagtaggtatgcttccctcctccccatgacaggaaatggtgtcttggcctcctagagtggtaatgtaccctagtacccaagctgaagaggtgccctgtatcccagagaaacagtgctttggtcacccagagcagataccaaacccctcctacccctacagagggcctgaccaatgaagttagttacataatgcctcccagggaactggtgccttggccaagcagagcagctgtacatcccagggcagagctgacatggtaccctgagtcccaaagaaacagtgcagtggatgaactgagacaccctatcctacaggacaagcagttctagtaccctgcttccctggagctggactagccacctagagcatgagatactggaaattctccttcccagggagtagagtcatagctgtgttgctctttgctccccagggcccaagcaatagctacactacaccattctagggtcattgctgccactacacgtggcttcatagagcctgggatactgccaatttttaccatctcagagtccagagtcaccactgcatggtgccttatccccccaggatctaagttgtctctgagccctgttgggtctggttcccaaactgatgcctaccctactccctaggtccaaactttcagagcatttctagggcagaagtgctctgaaggtttgcacctggggagcagggtagactagaacagagtctcagctacaaccaaattcccttggtctgaactgcgagggtgcctcagagtcatgggtgctgcttctgtgggcaatctatatccaacactgtcacagagagtggatctgcacctcaggacccatatgccacagtaggttcatgaggacctgagcctaggacctcagcttcacagctgctctgaataactgcaccctggaacccagcactagtgtggctacttgcaggtcatgtcagacctgacacaaagaaggatctccatggctaagtctccccattgtggggaaaatgaaaataggaagatctaatacacattttccgaccattttatttaacatatgcagaatacacattttttttaatcagcacatgaaacattctcctggatagatcatatgttagatgaaaaaataagttccactaaattcaaaacatcaaactgatatcaagtatcttttctcttcataacacagtaaatttagaaatcaataacaagaactttcaaaactgtacaaatacatggaatttgacaacatgctactgaatgaccaatagattaatgaggaaattaagaagggcattaaaatgtttctggaaacaaatgaaaatgaaccacaacataccaaaacctatgggatatagtaaaaggagtattaagaggcatgtttatagcaataagctctacatccaaaaagtagaaagatttcaaagaaacaacctaatgatgcaactcaagaaactagaaaagcaagaacaaaccaaacccaaaattagaaagaaggagtaaagataaacagaaattaacaggattgagactaaaaaataaaaaagatcaatgaaatggaaagtggattttcttaaaagataagtaaaatcaacaaaccattggctagactaaggaaaaaaaggagaaaagaccaaaataaataaaatcagaaatgaaaaaggacacattacaactgatatcacagaaatacaaagaatcattagagactattatgaacaacagtatgcaaacaacttggaaaacctagaggaaatgggtaaatccctgagaatatagaatctatcaagactgaattaaaaagaaatagaaaacttcagcagaccaataatgatgtgattaaaatcataataaaaagtctcccaccaaagaaaattctaggaccagatggctttactgctgaattctaccaaacttgtaaagaagaaataatgccagttcttctcaaactattaaaaaaattgaagaggagaaaattcttcctgtttccgtgaggccagtattatcctgatatcaaaacctaacaaagatccaacaaaaaagaaaactataggccaatatccctgatattgaacatagatgcaaaaatggcttataaaatactagcaaaccagtattttgaactgaattcaacagcaaataaaaaagattgtatatgattatcaagtgggaattaacctggaatgcaagaatggttcaatataatcaaatcaatatccatgatacatatcaacagaatgaaagacaaaaaccatttgattatctcaatggacacagaaaaagcatttgataaaattcaacacatctgttcataataaaaactctcaacaaattatgtataggaggaacatgcctcaacataataaaagccatgtatgacaaactcacaatcatatatgccatactgaatgtagaaaagctaaattattttaccctaagtactggaagaagacaaagatgtccgttttcatcacttttattcaacatggtactgaaagtcctagctaaagcaattaggcaagagaaagagaaaaagggcatccaaattggaaagaaggaaatgaaattgtttctgtttgctgataacgtattcttatatggagaaaaatctaaagcctccaccaaaaaattcttagaattgatcaacaaattcagcaaagttacagcatatgaaatcagcactcaaaaaatcagtagtgtttctatacaccaacaaagaactagctgaagaagaaatctaggaaagcaatcccatttacaacagctacaaattaatacctaggcataaatttaaccaaggaggtgaaatatttctacaagaaaaactacaaaacattgatgagagaaattgagaaggacacacacacacaaatggaaagatatccatgtttatggattaacacaattaatattgttaaaatgaccatgctattcacaatgatctgcagattgaatgcagttattttcaaaataccaatgacattcatcacagaaatagaaaaaacaattctaaaattcttacaaaactaccaaagaccccaaaaagctaaaacaatcctaagcaaaaagaacaaagccagaggcgtcaaacttcaaaatatactactaaggactaatgacttcaaaatatactatgaagtgctggtaagccaaacagcatggtactggcattaaaacagacacatagactaatggaatagaatagagaacccataagtaaattcatatatttacagccagcagattttaaacagaggcaccaagaacatttattgtagaagtgacagtctcttcaataaatcatgctgggaaaacaggatatccacatgcagaaaaataaaactggacccctatgtttcaccatgtacaaagatcaactcaaaattgactaaagataaatgtaaaatctgaaagtataaaactactagaaggaaacataggggaaacactttaggatattggtctgggcaaagattttacgaatatgacctcaaaagcacaggcaaccgaaacaaaaatagacaaatgggattatatcaaagtaaaaggcttatgtacagcaaaggaaaccatcaacaaagttaaaagacaacttacagaatggagaaaatatttgcaaactattcatccaataagggtttaatatctagaatatatgataaactcaacagcttccaaacaaataatccctttttaaaatgggcaaatgatctgactagacatttctcaaaagaagacatacaaattatcagtaagtatatgagaaaacgcttgacatcgctagtcatcagggtagtgcatatcaaaactatgatgagatgataattcaccacagttagaattactattattaaaaagacaaaaataacaaatactagtgaggatgtgaaggaatgagtacttttataatcttttggtgggaggataaattagcacagctattacaggaaacagtatagaggttcctcaaaaaaactgaaaatagaattgccgtatgatcagcagtctcactactgggtatatctaaaggaaagaagatcagtatattaaagagatatttgcactctcatgtttattgtagtgctaatcaagatatgtccattaacaatagccgagatatggaatcaaccttagtgtacataaacagatgagtggataaagaaaatttggtatatgtgtacaatacaatatgcagccattaaaaaataatgaaatcctggctgagacagtggctcacacctgtaattccagcactttgggaggctgaagcaggtggatcacttgaggccaggagttcaagaccagccaggccaacatggcgaaaccctgtctctactaaaaaaaataaaaaattagtggggtgtggtggcacacgcctgtagtcccaggtactcaggaagctgagacacaagaattggttgaacccaggaggcagaagtttcagtgagccaagattgctccactgcactccagcctgggtgacagagcgagactccatctcaaacaacaacaacaacaacaacaacaacaattcttgtcagtgaaataagccaggcccagaaagataaatactgcatgttttcacttatactcggaagctcaaaaagttgtttttatagaagtagagagtagattagtggttactagggactggaaagggtagatgggataggatagggagtggttggttcatgaatacaaaattaacagttagatagaaggaaaaagttctgttgctttttagcactgtagggtgaatatagctaacaacaatttattgtgtattttcaaataggtagaagagaggatactgaacgttaccaacattaagagttggtaaacatttgaggtgatggatatgctaattaccctgatttgatcattacacatagtatacatgtatcatgtattgaaatagcacattgcaccccataaatatgtacaattattatgcaacaattaaaaactctgataagtataaaggactaatttttcaggagacataattagtgaggttggaataagatttacacagtataaaatttaagactgcctaattcttgcacagtattttatatgaagaaaattaaataaaaataagcttgcttcacatacaattcagtttgaaaacacctgttgtaatagtcattagtttaattaacgttattaacattggacatccatttctaatgagtaaatattaagtaattgacacattaaaaaataagtaatcagtctagcatcttaaatatgtagttgaaatggactcaactatattcttttggtttatagattctttttattttgggaaaagaaccaaaaatttcttttgattttcaaaaaatgctaacataattataataaggcaattataatgaagtattggaggtcttatcaattatttttttcacagataaatttagtgttttaagttggatttggatagtaaacatacaacatctttagatacgtgtttcaaagtatctgtaagctgatatgcctccattctgttctcatttcattattttttaacattaatttattctttcaaaagatatttattgagttatacttatatgccatgcattgtaccaacttttggagatgtagtgatgagcaaagaagatgtagtcactgataattatttaggctccagagtgatatatgctataagggctaaataaacggggctgtgattgtattttacagttcttaaaatgacagtaaaataactgacttaagataactaccaacaaactcaaatatctatctaactaagccaaacttttggaaagcttttctctgctagcatggtattgaatgtatttcctgttatcatatgcttcatgctcctataacatacaaaatgaaagcatttcattagattgtgatcaagttagtctcatgggaaaatttgcctcagtttattgttttgaatgtaaggtggctttatagttagttgtaaatataagagcaagatgaactgtattaaaaattatattgatgtactattagttattgcttttctgaggagaagggaggtgataggccccaaataactgattgctcgtttttccttagcatggttttggaaggaaaagactttgctttttcatgtgacattagtaatattgtaggacttagaaaactgaactcaagatgagatgctgcttatgcactggttaactttaggaattgtgcaaaaagatatattagagctattacacagagaggaaagaatcagtgagtaaatgaaccaggaaagagactggggactagctaaatgtagaggttttcagtgtttgttttgtgattgttctgtatttatcaagccttgctgattttttgtaatgtcagttgaacttctccatgctgcagaattttgttttcccattggcaagatgctctgctgcctcttgatctccaattctctttggttgacatcctgtagtttcctgctggtttactttgatgattctacctacttcattcttagattctctggttatgatcttataaacagtgccactcatgactaaaacgaatgcattctggacaaaataggctttactttctttctgaactgctaataattttcaagcctaaaaatcttcaatcacaacccaaaaagtctatagctacctactgtagctttcaaaaaatctctattatgcaccataggcaactcaatattttcttctaacactaaatttcaagcaattaaatttcctccaatggctgaaaactactagaagtatttcaagttttttttttttaatcactttttctggcatcaaatcttggatgcatcaaatcatagaaagccctttggcagtaagagctgcttccacctgtgaaatctttattctgatttcttaagaggaagattgatttaattgtcaatgttgactaagtaagtggtgaagcttttgtttttggtttggtcatggtgtgcacaatgtctgatccctgtgtccttgaaagtgctcttgtcagtcaagacagcactggagaaggagattaaatggaaaccatttggctgctgtttttggaaagatagcaaggcatgacatgcttatgtgaatacagagcaataaaacacaaactgccttttagaaattttattgtgaagtttgtatttcattttattatctgattttaagaattgaaaagtaaatagcccaaataacagtcttgattttaatatataataaatagtttagttaccatacaattgaagggtattattcaacgtaatcatgaaatatagtttctcttttatggtggcgtgaacctgaaaacttaattattttccccaataaattagcaatttaaagctctttgcctttctaaaatgtcactgcattgcgtaatattgcgcagatgacaaagatagcttgaccatgacgtattaaatgctaaatgttacgtgcagcatgtaaaatacgttctgctttgtaaaattatttgatagagagtcgctgtcattgtttttgtcaatcatttattcatctgttctgtcccaggcttctttttatctagtcattttcaagaaacgctgatgcctgcttctgatctctagtgatttaaattagagtctctgagcatgaaaaggtgctaggccaaggtctaggaaaagaaatcctaaggcaggaatgactctggcttgtttgaggcacagcaagaagatttatagaagatttttgtgaatggaatgggtggggcaggggaggcaggagagaagagagagagagagagaaacaagggccagcttatgtaagatctataggtctgtaagtgttggcggaaactatgaaatgatttttatgcgtggaaatgatgtgatattatttgcataaaaagatcattgtgactttaacatcattacagaaaaaatatggaggacacccttggaaattgcacatttgatgtttgttgtgatttgttaggtgttcacacctaaaccaaattgaggtaattctgtttggcagattaattgtatgagaagaaaactttgttggcggaaaattgacacttatctattcagcttttaatgacctggtttagaaagcagcttaatgcttaccatgcctatgatgtatatggtgacaactatcctgttctaatggagaggaagaagcacatttcttttaataaatgtatgtcatttatattcaatacattttttcttaattcaaagagattttgaacaaaatcttgtttccatcatgattgcctgcttttccaaatttaattctatttcctgcttattgacaaaatgttttttgtaaatactgagatttattgttcctcaattttaaaaagtaaaaattatttcatgacatctttatgaacctgatttaatgtgctaatgactacttgcatgtcatatacttctgcctttcagtcaagagcttagttgtagcagttgacccattttctgaaaataaaattgttaatggtgaaactgtgtctatctcatcatttttctgagcacattacaaacaaaactctggaaatattccatgtaaaagtgtttccttgtgagataaaataaggaattatttggagcttcaaaataaacattaatgtattaaaaatatgaggaataccattataacattgtttaaatatgtttagtcctatggaaccattttgagtgtgtgtgtaaaacacctcatatgtttcatagaactagtgtttttcagaactcatttttggaaatgtttttctacatatattactgacttttatttctgcacgtgatattattgatgatgccttactcacctgcacatgtttataaacaaaacaaaacagtggaagacttgtgattctttttgacactgaacagatgtgaaatttattcccttattagtgcctgcaggacgtacaggtaaacgtgttaaaggtctgttgcttgttcttctaaagtcttaaatttaaatttacaagtaaccccaggttttttcacaaaggagtaactacagtcctcttagccatatgccaagatattagatgtttgtgtttctttaacaagcttctggacattatgggtgtagatcctttccattttttcacttgtaatctgacttagaaggctgatggatcatactggccaagagagtaaaacattgtttgatcctttcaatgcacacagtggcttttcccaccaaatgtgtaacaaccgaaacatttggagatctagcacatcttacttccaaccagtgaaggagaacagaatatggaaagggaaaaagacgcttaataggaggtgggttctaattttttaaaaaagaaaaaaatatgaatcgtaaagaaaggtagatgaagtagctaagtgactggaaagacttcctacagttaatttcctaggagttatggaaatattaaagtttgaaaaatgactacttaatctttattatcttttaaattaacatcattgcctactttttcttatagaaaacacttgtatttttcaagtgtatttgtaagaatttaaagtcataacatctaactgcctttggtaactttgagggttcatttttacacctttgaataattacagtatatctctgtgtgtaatgtttttagtctatagatggttacttggtgtgtggatctgtagatgttatgcaataatttgtagcccttagagtccaatggattggaactagcaaaagcaatggctgtgcatcaagaattaattgactagagtttagtttagatgtttgcagggacctaattatggaggagtgtaaaatttatcttgaaaattccaaggaaacattgaaggatggtagataggtgggtggcagaatcaagatttgcagttataagctatcaatgccagagagcagagcaaggactggggaaaacagtgtaggaatgaatgaagtgttagtccaattttcaaggcaaagggttattaatctctgacactaatggaatgaagacgaaggtatacattttaacactcttttgaaagcaaaatattaggtcggagcaatagtaattgtggtttttgccattgtacataagatttgatgacaatgtagagagttgagtgaaaggaagaaatactgtataacttgaagaactgacatttgcaagttaagaaatttgagagaggagcagctttagcactcatgaaaataagggcttatttctatgtgtctaatttgtggcagctttaagagctaaccagtggcagtagtccctgctgatcatactttatgcgcttgtgttacatcagattttatatattatgttctattaaacttatcagatctaacattgcagctttttaaaaggtaaattaaaatcttcagtttacattcagtgcacttaatgtgtgttattgctactttgtctagcatctagcttatttagaacttgctgacctccctctgtgcttctcaggagaatcatttgctgtaggtaaataattaaataaatccttgtggattcctatctgatcatcttgctcaagcaataggcaatccttttgcaaataagtgcctgcaaatccctgggaaatcccgtttggctttccatgtgggtgtttgcatttctgttatgtggaggatcactgaaaccacttgttgatcctcagggttattgggttacttaataggtgaaaggaggtctgtggagagaattcacagtggaaagtgaagatttttaattccaaacagcatgttcagaatactaccacgctcatggtagtaggctgtcagccttcgcatctgtgtagtaataaagcccaactaatttggaacattctgtctccagggaaggatgaagagggagctataagacagactgtaaccttgaaggagagcagctatggagcattatcattttctctgttcctcttctttctttctctgggagggagatgctagtcatgtaacctatggtttgcggttttttatcaaagaggggagatgagaatctcattctgaatatcatccataatttttgttgatatgctgcagtgtagatcatgggatatgtatgtgtgtgtgtgtgtgtatgtatatatcatatacatatctatatatatgatacatatacatatatacatatatacatgatatatatacatatacatatcatatatacataaatacacatatatacatatatgatccaagtatatatgtatccacaaacacacacacacacatatacacacacacacacacgtatatacacaaatacacacacacacacatatatatgtgtatatatatatatacacacacacacttgggtcaattcattttcattttgacatccaccactggagtggttggataatacttgaaggactttaatcagtgatctaagttctggaggcagctggggcaagatttcaaattgctgtttacatctgtaccagtgggttaattagcacaaaaagtattagaaatagtgtttccctgatgaaacaagtggtgttcatcatatgcagctggctagaaatatggtttggaaatctctgccttgccagctgtgtgctggtatggcagtacacatggtcctatactcctgccctgccatatcttaatggaagatctgtcctaggatcttttcctggattgactgggaaggttaatcttgtaagggatgcaattttatttatcttggagatcaccattcatgtaaggggcttttgtagtgatagactagggacttcacagagcttactggaacagtatgtatgactgtttttgtgcctactggctaatatttgcttatgaggcagaattttgtttgtgctttgttttgctgtgaaatatacctggttgtcaggttggttatgaggaagcataaaattcttgagtgctaccaatatttattagaaggaagctgataattgttgattgaacattggtttggatcttgttgcaagtctactgggaaggaatgtctgcaacattgtctgaggactttagaaagaatgaattaagagagggtaggatgtcaagaaaggcacggtaaagatagtccaggcctgagaagtaagcggactctagttggccctgcaggaatctgcttcctatgttatggaacatacagagattgcctgaaggggtgagacaagggaaacaacactgctcttggaatctctaatgtcagaaaccttgaagtgggcgatatggtatatgcacatttgaaagccatgaatgtgctgcagaaaagagctaaagggatgccatctgggcagacctagagagaacaagtggccagaacattagtaggttagtgtcataccaatgccagggccagataaaatgatgatgggaacaacaatgtccagcagggaaggaaatgatcaagaccacctgtccaacttttctgctcaactgaggggcatccctcaggttatccaactttctgtgacacctccagcagccagagcaggccaaccaagaaaagacagcataggagaagggggtatggggcaaaagaagggcctgtaaaggaggaaaggaaactctaaattagaaattttatgctgaatagtgactgagatttgaaaaacaaaacaaagcaaagcccccaaacaccccataaaaacaaaaaccaagaaacggtttacatgacaaagccactggactaagaataccagaaaggcagaattattttccctagacagattgatgtttatgaagttcatgatgttatgtgcaattcaagagaaaaaaataagctccatgtcacatatctgactattaagtgcacatatttctgtgttaactgcccagtatagcatctattgcatctgaactagctctcttttcttcttccgtcaccttttgattcatttgcatgtctgtctatctacaattacatgggctttttgtattttactttgtagggcgacttccagttactttcttttttttttttttttttttttgagatggagtctcgctctgttgcccaggctggagtgcagtggcgcgatctcggctcacttgcaagctccgcctcccaggttcatgccattctcctgcctcagcctcctgagtagctgggactacaggcgcccgccaccatgcccagctaattttttgtatttttagtagagatggggtttcaccgtgttagccaggatggtctggatcttctgacctcatgatcctcccgactcggcctcccgaagtgctgggattacaggcgtgagccaccttgcctggccccaatttgttaaatccttgcatcttccactcaagaaaatgtggcatatgctccttaacttgtattttgacataacatttcagatactttcctctatattagacaatagatagaagtgcacatatttttatttgttgtagtaacaaatggatgtttttacctttatatgtagttaaatttttgtttatatgtgcagataaatagagcacaaattccttgagggcagaaaatctgtcttgttcatgttgtttcactaccatagagacattatccctgatattcaataaatattggttaaatgaatacatttcagttactggaatgatgtcccactgtttatagtttttctcatatcttagtatttgtctgtgtctgtgtgaactggtcacgatggttaggggagcaggccaggtgctggggatgttgtctcagctgcagggcagacagttgcgttctagtgagtaaatagaagcagcttgatgtccaaggtttcccaagactacctccaggtgctttggaggaaacagattagctccaggagtccccgatggagcaatagggagctttagcttgtgggcatggcacagcaatggagaatcaggtggtatttaatatgtagacacctggggctttaaccagtgttctttttgaagtctaggtctgccatgccagtgaatgggatttatttgtcaagtttcagtttctggagggagggtgtgacaaaagtacattaagattctaggaactcagaaacaggtatcaagatagaaacggttacatactgaagcccaaggagggatgcacaattaggaacgtggttgtctgtggcctcttaacagaatgggtagcttctgagagggaggaggctgcgactctggacccagccatcatcactgtcctgcaacctgtcagaagagtgatcagtatcattaaatgaggaataaaaaagcccagttgatctcttgcctgaagtgttttgactgtaggatgggtgggtgggggttctgattgtgaagcttggaaaataaggacatggtgatgctctgtgagcacacttatatctattagtccacctcatttttttcacccttttcatctctttcttttgtgtctcctttatagcagaaacctttctgctttctatcccttcctcttctttcaatcttctctttctctttttcttcttttgcctttctcccagctgcagggtatgattttgtaagtatggtaaaaattctatacctaatatcttatgatttaggtaaataaaatctaatgcatatgtaagaataatctagaaaaaaggtctggggattttttggtgttgagggatctataaaactgagaaagaatgtgttttttctgcgacattgatggaacctatgaatacatttaatttagactttatggccgagtgtggtggctcatgcctttaatcctggcactttgggggcataggcgggtggatcacttgaggtcgggagttcgagaccagcctgatcaatatggtgaaacctcatctctactaaaaatggaaaaattatctgtatgtggtggcatgcgcctgtagtcccagctacttgggaggctgagacaggagaattgtttgaacccaggaggcagaggttgcagtgaaccgagataacaccactgcactccagcctgggtaacagagcgagactccatctaaaataaataaataaataagtaaatagataaataaaatagactttagttaaaaaaatgttttcagtataacaaagaaaatacagaagccaaagttaagttatgtttgccctactgttcttgtgaagaaagaaaagataaccacagcataggtttatttgttgttattgctttgaattagctatagaacagttatgtataaatgaaaaacatatttccttttttgaaaactacacttttttcagtgacttaagacacataacaaatttatgtggccttttttttcttttcattgggttagtataattctttgagagtgtattaatagatagaatatatatatatgtatatatatatgtgtgtatatatatatatatatatatatatatatatatatatatttgagacagagtctcactctgtcgcccaggctggagtgcagtggtgtgatcttgtctcactgcaacctgcctcctagattcaagcaattctcctttctcagcctcctgagtagctggaactacaggtgcatgccaccacactcagctaatttttgtatttttagtagagatggggtttcaccatattggtgatgctagtctcaaacccctgacctcaggtgatccgcctgcctcggcctcccaaagtggtgggattacaggtgtgagccaccatgcctggctgtaaaaaaaatatttttacagtgttgtatacaatcaaagttttgttcattcatcattttaagacaagttccttgaatggatgttaaggagaccagacagaaaagattatgatagattcttttgattgcaagaaaaaaaaaaactcactcacctcagaaaggctaagtttagagatgaacaagacaggaaccccagccaacatgtccagtctttaagagaacccggggaagatggactgagattcagaattgggacgtaactagtgtggctcttctgagtagattccctctctgccccctagtgacagagttgatcctctgccattgggatgacagctccctctgtcatatttttcttgctgccaccagtactctctttattgtagatgtttctctaccattttctgtctcggtttcttatcacttatacttattattcatgaactctactgctttataacatctgtaaagtatcttattcctctgtgtctttggttttctgctccagctacaaacagactaattctcttcccatcccgctcagagtctagagcctattcttggttcaggtaattcactgttactgttgcattttttttaagagacggaagtctccctctgtcacccacgctggagtgtgatggtgccatcatggctcacgtcagtcttgactccccagactcaagcagtcctccttcttagcgtctcaagtagctgggactacaggtgtgtgccaacacacctggttaatttgttttgtattttttgtagagacagggtcttgctttgttgcccaagctgctgttgctttgcttaggtggaggttttgtgccagatccccacgtaagccttagatgatctagtcttagctcaggtgcctactctcgtatcttcagagggggaaaggcttatgttgattgtcttaaggtagggttattcttccagcaggagaatgggggatgacattcacagatgagatttataggcatggcaggcattttgagagcacacagatggccagtttgagcatagtgagaaattccttgtcacaagtgcactggttggacaatctatggtacctagcacagaaacttgctcttggttgaccttatatttttgtttaccttatttctgttttgagcaaaacaatcaatgaatgagacataactattcctcactgagtttttgagactttctttggatctcattgcatattttatttatgccctcctcatttagttcacaattttccttacaaattaattgtcatttactaactactttatgggttatttcaatccatagatgagacttaaaaacacataaaccacttatactgggaattaaacttacttgataatgttgacgtctgtaagtatttgaggctatttcagttttaaaacataataaagattgcatctcacagtgtagtctctgtcttgaataaattgcttctctgcaaagtaagtccttgagctaacactcaagaaattacacatgtaacattggccaaaagcacagttagcattttttaaatttgaggggggattgtctttaagagaatatactttcaaatgtatgtgttacttccctttaagcatgtgtgtatgtgtgtgtgtgtgatgattgttggtttgatttttggcagggtggagattggtgacctattgataagatttttctcctctctttaacacttttcattctttacccaaactcttcctaaacatctattgagcatttactatttcccaggcacaaagaaaatgatgtaatttttatctaattcagacatacagtaagtccgtggttgctgtatttacaaatcagctggcaagatgtaagtagtttgaatactatggtttccttgattaggctgcagtttttaatcatttgtacaaatggttatattctttcaaatttcatactgtttatgatttttttctgaagcagggtttcttggcaggtattaatagaaaacaataaacatcattatttcatttggcaataaacaattaatagcttagaatggttttctaataaaaacacattctacaatgaatgagagtttttcttttccagcactatcaataaaaacttacagttccctaaaatggtgaaatcaaatgataaatagtacaaaggattttaacatgcaaactagatgtgttatcctccatttgtaagaaggaaataagagagtcgagatttctgagtcctgaccttggctgtggtgctactaactcatctttcaacgttgattttctctttggtaaaagaaggaaagcacaacactgtgtatgggacagagtagttttgaaaataaaatgtcattatatcagtgaaagcatttaaattaaaagaaacttacaaattcatcatgatcagaagcttacctaattagtatagattactatttagaaattaataattaagttaagcaagcatttaataggctgacatctattataacattatgataacaagttattataatttatttacttgtctgtctactctactattagattagaaactcaatttcttcatctgttttcctagtccacaatacaatgcacaacattgagcaggtgtttggtaaatgtgtgttgggtgactacagcaagagaagagataaagatgaatctttacaatatcatagtctgattattatatactactgaacgagctttcagtcaggcttcagagaaagttagatccatttaagaggtagctacatcattgatttttccaatgcctcaaactatgagattggaagacttttgtttctttaatttcacttgttgtcgttgctgtgaatggttacagcaaacacagagaggatgtgcctctggcagtattatcttcattaactgtatcaagttgtcttcactgagataatgtattgtgctgacttgaatataagtgttttcatgaatggcaaattgatgaagactggtttgcccagctgcatctagttctccagaggagttacctcctatggctagtactagtactttctacttactaatagattcagagcattgggaagattcctagttggtcatttacttcttttaactacatacagcttggaaattaaatatcgttagtattacataacctgtttcttatggtgaaatgtctgcgaaagtttacatgcaagtgcactctgacatcacttgttggaaaaaggaaatttggttgtaaattttgccttttcagcatgtcataacttctcctggaatgtgtaatatgacctcatatttgtattgtacttacagttttgaaagtgttttcatacatgaactcctttaaaaatactccaggagagagggaggttaggtattattaacatcattttgcaagtgctctgtagattattttgacctaacatccatgtgacatatctaattgttaaatgaaattagactggacctttttatgttgatatttctgccccttttattcttctggagatctgtgaacaaagaagatacttgctatctacactaagccatatcattgggtcttggaagactgagctcaaatgagataattgcaatcttctctcctcacagataggaaactatcttcaggtatcacagagtaaatgttagataactaaaaaggtcagagatatttttaaagttttgttaggagagaaaaaattcccttctgcgttttatccttctatccaagaataggctgaagagaaagatgtccttagcttgggtaaatagaaaataatccttgtttattataagcattttatatattcatttatatcacagtgtgttttatggagctggggaagggaatgattatatatatatatatttataatgcatggcctctttcttaagtagtcatagtttactgaattctgtttgaagtgggaactaagctctaacagaggaaacatggagaagaacattctagagaggaatcaagtaccttcagtactaatcagatttaaatagtataatacagttgaactaatttaagagaaaagtagcctaatactttctgagggagcaatgaagaaaaatgagcttaataagataaacttttatttatttaatagttgatatttagagatacatttttggttctttatattttggttctttatgatattttgtgatgctgtcctgtataccagcatccagttttcaatactgaaattgtagacccaggcatctgatatatcttaagtttcttataaaataaggttggatttacttttccagttccataaacattgatagttcaagtgtctatagtttttttattttttttgacaggccactgagatatcacatagtagatgtcgaatccttaggcagtgaaaaggtatcaaagcagataattactctagaaacttatttgaccagttattaagacacaaatgatttacttagctattgtctttgggaagagcttcaaagacataagaaaataccttattagagtagaattgaattggaataatactattaagcttccagtgatttcttcatttgcttgcggtgtaaaatatgttattaattcatttggaatgaagagagatcatttggtctttgtgtaattattaaattaggaagtgctcaatatcacctgtaacatatcacatttatgaaattgttcatatctcttctaaatctgtttatttacagttttaaaaattggtctcctctactatcttcaaaagaagtgaagatgtaattaatagaatatcacaacctaaatttgatgaaaaactatgtgacatcatttcttaagcaaacataaaaattttaaagtatataaacatacttgaagtatatataattcttaaaatctactgaaggctcatctgaaattccatgtcccttttttgcttctaacaataacaaatgtctttaaaacaccaaaagagtatctgtatcattttatagaaaacttttatttccttcaaagaatcaatcattttggttcattattatttgctaatattagctcaatttgggagaagccatagaaaaattcagtaaaatgcatagtatacattagtaaataatacatacattcaagagtaattattttgttgtacttggcagacaaccaattaaaactcagttaagccaaagaatatgcattggttactatagtagaaagttctagagtggtccttcaggcctgactgaatccaggcagttagatatttatttctctctcatagctttgttatccactgaattatattttaaggcaagaaacatgaggtcaaaatagccaccaggttttcagtcctccagttcgttaattcaagttgaaagggattgtttctttgtagttttttaaaaagggtgctgattgtattttctttattttaacttattccacattcccactcataagtgaataattactattaggatcatggtactgccattgaccagtcctggaactacagctagggtcacccttagccaaacataactaccaggaaagaggaaaaaaaaaaaaagtctgcaaaggaaattcagggtgctattaccagaatattttggtggaggggagggtgttgggtggtgacaggaaagcatagtgtatgtataaacaagttaaatgcagggtgcagggtgaaatgcacactgttatgtgaaaatgctactgagcaaaagagcaacagtttaaatggtaaaataacatttggtattagaataacataaagaacaatcacaaaacattgatattgaaaatgttcgattgctgaagaagggccttcaggcataaccaatcatcatataaaatattggtgatgtctgcatctctgagactgtttcctcatctgtgaaacaattattattatatggctaacagcagacaaatttgtatatgtttttgtgcttgattatattggtacagaaggtattccagattttaccgagcagtgtatgtataatttgagtgaaattatatccaattatggtgatactacaattaatgtagaatacagacaagtattagtaaagctcccgaccgctgcatcctgcaactgtgggaaattggaagactgaataatagctcactgaaatttgcctttaaatatattgcacactctatggatattaacatgaacaaaattaaactccacaggactggaaaaattaaactaatgactttttatgtaatccaagttaatgaatgctttctggcccaacttttcgttaggaaatcaaccacagtttcctgatttccttcattccagcagcttccattgtgtgactgtttacaaaagtgcttaataagaactcttaatgaagacttgctctcttttcattaatactgaaatgtatttacatagttttacagcttttaggagtaacaggtagtcttaaaaattaatagtggcttttagaatagatgttgtataaatattttctttaatcatctgaatatttctaatgtattaaaatactatagtaaagaatagagaatcacaatttcatcttctaaatgaaagaaggaaggcaggggcttaaaatatggggaatatttggaaaaaattctgtttctattgatcttggtgctgaaatccatattcgcagggttttacagatatgttcactcccctgtatcctcaggggattgattccagggccaccagcagataccaaaatctgtgcatactcaagtaaggctgcagtagccatgcggaacccgtatatatgaaaagccagccctccatatccacgttttacattctgtgaataccagtactttccatttgagtttgatttcagatgcaaaccctgtgggtatggagggccaagtgtatttattaaaaaaaaaatctacctggaggtggaccgacccatgcagtccaacctgtgttgtttaagggttaactgtattcctagtgttaaatgataaactaaatgcaaagatgattaatccccaaaattaaatgtaattaaatctataaaacacactagacaaatacaattttaatcattaattaaatacacttttaaaaacacctgtgataatgacttacttgctttaatgcctttgtatcaattcatagctaaggtcttaacgtaagatttagcaatttaaattacgttattttatggacaaaatatataataatgacattaagggaaaataaactgtaaggcaacctttcctaatctaatgatggaattgagtgaacagttggttacctgtaagaagagcaaccaagttaaaagaataaaacgttcaaaggccataagccataaggtttttatgaaaacctcagaaaacctcattgaaatgccatgaaattaaaaagcacaccaaaaggaaaataaaagttataaaataagcattcaataaacatataaacttatacttcacttgcagttaaagaagtacacattttagaaaaagggataaaatttgccaaattgtcaaagattaaaaagataattgctgggaagtgtggtttaaattcagcattgtcatatgctattggtggaagtctatgttgacatatctttccagaaaataacctgatgatgtgcattaaaatactaaaaagatcaaatactttttgacaggaatttcacttttatgaagccacaagaaataaataatttgggccgggcgcagtggctcatgcctgtaatcccagcacttttggaagttgaggctgacagatcatgaggtcaggatttcgagaccagcctgcccaacatagtgaaagcccatctctactaaaaatacaaaaattagctgggcgtggtggcacatgcctgtagtcccagctacttgggaggctgaggcaggagaattgcttgaacctgggaggcggaggttgtggtgagccgagattgcaccactgcactccatcctgggcaacagagcgagactccatctcaaaaaaaaaaaaagaaagaatttgagatgagcacaacaaatatttatgtacaaagatatgtactatggttttatttacagtgtgaaagatatggaacttttaaacacaccaacggaaataataattactgtatattgctgagtttttatgtgtcgggctatatgattagtgctgtgtatagattatctcatttatgtctaagttcacattaatatgcagttagcatttatttctaaatttacctaccactatgtttataatagacaagatttttctcagtggaactcacctttcatcacgtgtggaagctgtatgacttaggagaattggccatatttgtatctccaggaatactgcctgattgtcttaagccagtcagtgattctgcacccctaccaattggttagcaatgtgcttatcacttcattggctcagataagaatgaatacccaaactttcgattagggattgagctagaaattatcttctccccttagttcttagttatgtaaatggcacaataaaaatcgagaataggaaatttatcaataagaaaaaattgtgcagaaagctaactgggcaaaagctaatgctacgtaaaagaaatgcaaatcaaaaacaatatatacgccaattttcctattgtaattcaattttcctattgaattaaaataaatttttaaaaccctgatatatatgaacagtataggaagattggggtgaggtttgcatactttttcacttctctgggagtgtaatttgccctattttccagacaaagtattgtaattatatacagactttgatccggtaatttccattctcccttgtctcaatagtcagatgtttaagcagtgatttatataacagataaaatatatacatagaatatatcattcaatactttaagtgtttcacaaactttgtaatcgtttatttctcaaagcaacagtgtgttagattatatggatgaggagactaaggcatatcctgtcaaggcaacatagttttggaatcaggcttataacactttccaggccagctacagtcattttagtcactacgctactttgcttcaattctactcatcacagtgtctctatatagaaaaaaaaaaaaaaaagaaaaaatcttaaatgtggaacattacaatgggcaaaaaaaattataaggtggcatgttacgccaatagtatttatttgaagacttatttaatgatataagaatatgattgcactgtaggtgacaaaaggtaggaaatgaaattgtacgttgtctttgtattgctataaaggaatacctgaggctaggtaatttataaagaaaagacgtttatttggctcatggttctgcaagctatatacgacacatggtgccaccatctgcttctggtgaggactttaggctgtttaaactcgtggcagaaattgaagtggagcctgcatgagcagagatggtatggcaagagaagaggcaaaagagagaggggagggaggtgccaggctctttttaacaaacagctcttacaagggactaacagagcaagaactcactcattaccaccaggatggcaccaagccattcatgagggatctgcccccatgacccaaatacctctcactaagtcccacgtttaacattggggatcacatttcaacatgaggtttggagggtgaaatagctgaattattgcatatgtatagtacaatttcagttttagaaaaagactgggtagaaggtgtctaaatattatcttttagtttatcttaatatagatgatttttattttcctttataattttctaattttctaagtgttttgttcatacacacactcacactatatatactgaaaaatataataaccaaacgtttcaaggaaagtgacttgtgttttccactaatttcagcaaaaagagtgaatgacttgataatttttctcctactttttctaatcagaaaaatttcctgcccttgagagcttcaaagcactgcagaaagtttaacagcacatgcaatggaaagcatggattgaatttgattttaaattgataaatttaaaattcttatgtgttctgaagagtttgtcatgtctcatccgctatcgcttttttcattaccatactgaaagctgagggtatggaactcagaatgcatttggaagaataaaaggtgatatgaattcttggtcttatctgatttcctggaatagaaaaacccaggattaaagctatctttgtctggttctattcctatataaattaaattataaagatcttttcagttttacatcttataaatatgaatgctttgagtctattttgcattagcatctaacaaatatacacacatttccaagaagtaatttgcttgtctcatcccctccctttcatgtctcttcagagccgccttggcaatatgatcttcctaaatacatatctaaaacacgtatcttactgtactgcttccctgtttaatcatacttccatcacctttagggtaaaatacaaatgttataacatggcagtcaggagccttcctgatgtagcctcatcttattactaaagttttatacaaaagagtttcctataaatattctattttaaaataaaatattctaactaatagcctatccttgaagatggcgtgttcgttcttattcctgtgcccttgcttatggtgtttcctttgccatccgtggctttccccaccatcctcactggacagcttctgtgaactgaaggttaatgagtcttatctctttgaggaagacttttctgcagcacctagccttgccttgaacatagtccttatcacactgatgcatgcaaaggagtatacagacttattttcctctcactagtaactaaacaattgggcattcaatagctgtccagtgaatattggtttaatgaagaaaattacttttctaattttattttccttagagtgtaggggtataggtatgactatttgcatgtcatttccttagtgagatgactagaatacataggaagtgattgctccaagctacttaggacaatcatcctaatatcaccttctttgtaccttttgcttggaacatggggtgaaaacatttgagaaggtgtcttaaaggcatactaaggcatgtgtactttgtgcattggtgatgtggccaaattacttgttagagaaattacgactggctagggatggataggtggggagtgtaaactgggagggaaaacaaactggagattgttgtattaagcagaattgaatttatttaactgcatgtaggtggtaagggaaaaaagagtgattaatcatgccagatttcaggtgtgagcaatcagtggggattgaacgtttacttacttaaagtcacaggacaaacaagaaaaaaatagaaaagaaaatcagggccaagatcttattttatatattttgaatttaggagcttatagaggataagaaagaaatatccaggaaaactcctaaaacattttgcaaattagattaaatactgttaaattattggacttaggtaaaaaagagaataatgattttgaaaatattttaagatcatgataatggtggtctgtatttcatatgatgacaagtagaaatacaagttggcctgacttctctgttttgcttggtttattgcatatagaatatttaagatttacctgttacattaacaaattgaagcattttgtcatattgcagcattaataatgtttttcttaaatggtactgttggggataaaggaagttttagtaaagaaatagttggtttcatttaatttcatatacgtcttcaaattgtgtgaaaatatataataaatggtggcaaaacagtatcaaattgagcatattatgttcatactaaaattttaagaagcatttgaattggaaatcaggattttatattttaaaataaaaatatgttcaaaagagcagcccctaagccagtctgagttttgcaagaatattcaaagtgctctttctatgaaaaatctaatcatatcagacatagaataatagatcccatttggaaaatatgtcatttcctgcaagaagaaaggcagaagtaggcataagttagttcttattttttgatatgtgtatttttgtgctcttctttattctgtcacattgcataaaatattctagtttgaaaagtatttcctgcagtatgactgggtttcagtcaacgtaagataaaaataaaggctacggggatgttaaattgaattgaccatttcaaggataatattttcttttattaaattttggaattagatcaattgaagagttttattaacaattatttatcttgattaaattgaattgaccattttaaggaaaatattttcttttataaaatttggaatgaaatgtattgaatagttttgataacaattatttatctcgaattatttctctctaatttctgttcataagatcaatagttgtcaaaagaaaaatggaaaaactatatcatcctaaaaaagaactaattttgttcttccttttctctcctctcatttaagaccaacaaacaagaaaaacatgatctgataaaagactgtggaaattatgacatggttttatagtttaccttttaactatgtgtcatgcttgaaatttcctgtccaggataaacacatctatttttagagctggaagtatgtgatgatacaacccttacattttacagcaaggtgaaatgaattgtgtcattcatacatgctaagatccagtgaatgctaagaaaataacatacgatttaataaataatagtgttactgagtaagcaaacattatttttcactaaaattataaaatataaatatatggccttaaaatatactgtgctaatattttaattcaaaatttaaaattgttgctttttgtagtagatgctgttgatgatcagcctataacctctcttttagtgctgtagttcagactggcaaaatttctaatgcttatcctgcatttctctacctaagggattctttggccacaagagaccactttgccaaccaaataggctgaaagttccagggaattaatgcccctgggagcaaccctcagctaatgactaatgaggattggtgtataaatatgctagctctcattcttacagtgagatatatctgaggggtgtatttcacagtggatgtctgattttccccagccagattaagctgcagttgccagtagtgttacaggcctgataatgatctctgtgttggtaggaggtcttccactccgggtctcacttctttcttttcatccctgctaatatttcctgggatcatctcccaaataaacttctcgcattgaagttattattacctcagtgtttgcctctggggcaacctaaactgagattctttctttctctctaaagtcatgttagaatatgaaaaagaagctgggcgcggtagctcacacctgtaatccacccagcactttgggaggccaaagcgggcagatcacctgaggtcaggggttcgagaccagtctggccaacatggcgaaaccccctctctactaaaaatacaaaaattagccgggcatgatgccacacagttgtattcccagctactcgggaggctgagacagaagaaaacaaatacattgaacaaataggtcaataggcttctgaagaatattgtggctaagctggaaaacgatggctttcaaagtattcagatggcttagattgaaacacagaggaagagataaaataatatttgagatctatctaagaaagtcaaaaatatagatatggcatcatcaatgtctgtatcaaggggtttgtatcaaagttatgacgggaagcagggcacaagacttagatatgtttctccattcttccccctccctcaaaaagatcaggtctttttagtgttttggcaaaagatactatgctgtgaattctggtactatttgaacttatgtcagcggtacattcgaaataatataattaaaggaagacataatttgtgctgttgtgtctacccagaaagaatttttgttttgtttgttggaataaaaatagaaaagtcttaaccaattaacatatctcttctagttatagcatgattatgaatagaaggataagctatctaaatgccttgccgtaagagtcaaagtagaatgaaaatgaaagtaaatcagtgccttctaaaattcagtttcaccttcttaatcatcatgaacagggtatgtgcttggttagtccaaataaatcatatgtgaaagagatagttggggctacttcttgttcaagggggaaaggcatatattgttaaagaactatcaccaggctttaatagtaacatatctgtgagttaaaacatttaacacatcatctacaaatcttgctattttccattacctaggtatcagtaataatgttttccaaatatttacatattttatcattatttccctattatttggtaactttcttgaacatttgcaagaagcataattggaattttaaaagatatgctggacttctaaattaaaataaacagaaatgtaattattgattaattctaagtccaattatatttttctttttagttatttatgattccatctgatatacataggagagaaactgatagaagaattctgatggcaactgtatgatagaagctatataaagtcaagtgtccattttctttcaactatatttgagcatacccaggtaagaataaatgattgtttatacattttccattatttccaaaaaggacttgaaattataaaaatgcttttattatgtgttgaatgtttaaaaatatagtcttttgttgtaaaaaatagtaaaattcataaaagtaaaataaaattaaaagcactgatgagccttttttctgaaaataacttctgtcatcattttgttctatataattttatttttgttttgttggatttttcctttaagcaaagttacaatgatagtattatatttagttgattttcatgcaactgataaagacatactcatgactgggaaatttacaagagaaagacgtttaatggacttacagttctacatggctggggaggtctcataatcatggaggaaggtgaaaggcacgtctcacacagcagcaggcaagagaagagagcttgtgcagggaaacgcctgtttttaaaaccatcagattttgtgagacccactcactatcatgagaacagcacaggaaagactcgcccccatgattcaatcacctcccaccaggttcctgccacaacatgtgggaattgtgggaggtacaaatcaagataagatttggttggggacacagccaaaccttatcattccatccctggcccctctcaaatctcatgtcctcacatttcaaaaccaaacatgccttcccaacaatcccccaaagtcttaactcatttcagcgtcaactcaaaagtccacaatccagagtctcattagagacaaggcaggtcctttctgcctatgagcttgtaaaatcaaaagcaagttagttacttcctagataaaatagggtacaggaattgggtagatacagccattccaaatgggagaaattggccaatgcaaaggggctacaggccccacgctgttccaaaatccagtggggcagtcaaatcttaaagctccaaaatgatctcctttgatgctatgtctcacatccagatcacgctgatgtaagaggtgagttcccatggtcttgggcagctgcgcctctgtggctttgcagggtatagctgccctcctggctgctttcatgggctgacattgagtgtctgagtcttttccaggtgcagggtgcaagttgttggtggatctaccattctagggtctggaggatggtggccctcttctcacagctccactaagtggtgccccagtagggactctgtgtgggggctctgaccccacatttgccttccacactgccctaggagaggttctccatgaggaccctactcctgcagcaaacttctgcctggacatccaggcatttccatacatcttctgaaatctaggcagaggttcccaaacctcaattcttgacttctgggcatccacaggctcaataccatgtggaagctgccaagacttggggcttgcaccctctaaagcaacagccaagccatgccttggccacttttagtcatggctggagcagctgggatgcaggcccatcaagtccctagacttcgtaaagcagagggaccctgggccaggaaatcattttttcctcctaaacctccggggttgccatgaagacctctggcatgccctggagacatttttccccattatcttgatgattaacatttggctccttgttacttatgcaaatttatgcagctagcttgaatttctcctcagaaaacgggattttcttttctattgcattgtcagactgcaaattttctgaacttgtatgctctgcttcccttataaaactgaatgtctttaacagcacccaagtcacatcttgaatgctttgctgcttagacattccttcctccagatacccgaaatcacctctctcaagttcaaagttccacaaatctctagggcaggagcaaaatgccgccagtctctttcctaaaacataacaagagtcaccttggctccagttcccaacaagttcctcatctctgtctgagaccacctcagcctggatgtcattgtccatatcattatcagcattttggtcaaagccattcaacaagtctttagggagttccaaactttcccacattctcctgtgttcttctgagccctccaaactgtttcagcctctgcctgttaaccagttcctaagttgcttctacatctttaggtatcttttcagcagcatccaactcctggtaccaatttactgtatgagtctgttttcacactgctgatgacgacatacccaagactgggcaatctacaaaagaaagcagtttaatggacttacagttccatgtggctggggagacctcacaaccatggaagaaggtgaaaggcacatctcacacagcagcagacaagagaagagggcttgtgtaggaaaactcccatttttaaaaccatcagatcttgtgatggttttaaacccactcactatcatgagaacagcgtaggaaagacccacctccatggttcaatcaccttccacaaggtttctcccatgatgtgtgggaattgtgggaattacaattcaaggtgaaatttgggtggggatacagccaaaccatatcaattatatatatactttgttgattttctttattattgtgtaacaaatttgttttcttctgttctttgagaatatgaattagtgttttgtattttctattatatctgttaatatataatatgttttaaaatatttttattttgtatttattattcagtcaatattcttatagataaattgatatgtacatcacttggtttgcattagtagcattactagaattggtatcactggctcaatgactgtgatcttttaaaggctttttattgttattgctgagtttaccggtagaaggtagtaacaagttaaagttttcattagccagttttgaaaatattgaatcactgattagtgttttctcattcaaataattttcctaatgaaacccagtttaagttgaaaaaaatgaaaattaaattaaaattttaaattttggttgcaggcagtagcaatttctttctcacatctattcagcaatatattcccttacataactaagcctagaggaaaagtgaatgttatatggccgagtgtggtggctcatgcctgtaatcctgcactttgggaggccaagtcggtggattaactgaggtcaggaggtcaagaccagcctggccaacatgatgaaaccccgtctctactaaaaatacaaaaattatctgggtgtggtggcaagtgcctgtaatcccagttacttgagaggctgaggcaggagatccccttgaacccaggaagcagagtttgcagtgagccgaggttgcaccactgcactccagcctgggcaataagagtgagactccatctaaaaaaaaaaataaagaaaagtgtatattatatatgtataatcttccacattgtttaaaaatacaccatttagaaataatatcaagtatacatttatctaattaatatttattgaaaacttatacttatcaagcactgtgattagcaatggcagtgaggatggtaaacattagagaagggaaggcacataaatagttccttgtcacctctaactttcaataaaatatggcaagataagaaatacgttttggtttcttatgtttaagtaggctgtattaagtgacaagaaagaagtaaaataatagggcagtttgtaatggtaacactttcagcttgggaattgaggaacactttcacaaacaaaagaccacttgagttgtgctttttaaggtagagaggaacactgacaggcaaacatttaaatggagagtcaacttggagcaaaggtactgggctggcaaaccatagggatgggatgttcaggaaattggaaagagagattagatatagcagagtagttggaagtgtgttctgtgatttggattcttataactaggcatttgtgtctcattattatatggagaggaacaattgcaggggagccagatgaaccatgctatcctttaagaagttttttttttaaatttttttgttattattatactttaagttttagggtacatgtgcacaatgtgcaggttagttacatatgtatacatgtgccatgctggtgtgctgcacccgttaactcgtcatttagcattaggtatatctcctaatgctatccctcccgcctccccccaccccacaacagtccccagagtgtgatgttccccttcctgtgtccctgtgttctcattgttcaattcccatctatgagtgagaacatgcggtgtttggtttttttgtccttgcgatagtttactgagaatgatgatttccaatttcatccatgtccctacaaagccacattttcttaatccagtctatccctttaagaagtttaatctaggccaactgcattggctcatgcctgtaattccagcactttgggagactgaggcaggtggatcgcttgaggacaggagttcaagaccatcctggaaaacatagtgagagcccatctctaccaaaaaaaaaaaaaaaaagtagaaaaacttagccagacaggatggtgtatacttgtagtcccagctccttgagaggctgaagtgggaggatcacttgagtccaggaggtgaaggtcacagtgagacgtgatcacaccactgccctccagcctgggtgacagaccaaaactctgtctcaaaaaatcaaaaaaaacaaaaaacaaaaagaagtttaatttaaaagtgatatgtgtgttagactaatgaagagagagcagctcaaaggaaggcagattagtttgcaggcttttccttacattttgatcactatttgctgaacccttgccgctcgccaggcactaagctaggaactgtaggaaaataaaacgatgaagacataatctctacccttgaggagtttataatgtagcagatgtacctgtatgacaaacaaatgaatagaatacaccatgaaagcacaagagaatcatgtttaagtaaagactagtgagtaataattatgttggcatgcagatactgagttaccagtagcctaggtttccccaaaaacattaagtctgatcaaggttgcccaagaggcaatgtttctaaatttttaaataattcaggaagaaacaatagaagctttgtctagggcgaaaaaaatgtaaataaaaaagaaagtgtggtagatgagacttggtagtagtagaagcagttaagcggggattaaagaaacaggccttttgtttaggcaagaggggcatgttgatgacaggcacagaaatggggaaaacagagtaaaagcgggttttgttattgttggtaaaatttgtttggctttgaacactgaagaattttctctcctgcttcactttcctgtgttcaaacctttgctagagcactcataacattttaaaatttcattgcaattccttattgagaattgaggaatattattgaggattaattaaggattcatttatttattactaaaaattatttccatcctttaaaaataaaagtataatagagtaatttacaccaaacaaaacaaaaatataaataaaagacctgatttcattcattaccacaatgtatataatttagccttacactttccagcagtcacaaaaatggatatatgttctttctctaaaagctgagataaatgtattatgagtcttagtgtaatggataggaaaagtgtccttacctcctagaggtaccttatatattaaattgttaaaaaataaagggaattaattctttaaaaaaatttcagtaggtcttggggtatcagcggtttttagttacatggataaattgtacagtggtgaagtctgagatttttgcacacttgtcacctgagtagtgtgcattgtacccaatatgtagttttttattcctcacccagttcccaccctccccattctggatgtagctatccagagtctccaaagtctcttataccactctgtatgcctttgcatacccatagcttagccaagcgagaacatgtgggatttgtttcttttattcctgagttatttcacttggaataatggccttgagctccatccaagttgctgcaaaagacattatttcatccttttttttttttaaatggctgagtagcatttcatggtgtacatatagcacgttttctttactcattggtccatgggcacttaagttgcttccatatctttgcctttgtgaattgtgctgcaaaaaacatacgcatgcaggtgtctttttgttatgacttcttctactttgggtagatacccagtagtggaatggctggatcaaatgttagatctacttttagttccttaagaaatgttcatgctgtattccatagatattgtactgatttacattcccatcagcagtgtatgtgctctgtttttgccacttccacgccaaatctattattgtcttttgactttttaataatagctattcttgcagggcatctcattgtggttttaattggcatcgtcctgatgattagtgatgttgagcattttttcaaatgtttgttgggtatttgtttatctgcttttgagaaatatctatttatgtcatttgtccacttttagatgggattatttgtttttttcttgctgatttatttaagtaccttgtggattttggatatttgtccattgtcggatgcatagtttgcaaatattttctcccattctatgtgttgtctgtttattctgttgattatttcttttgctgtatggaagattcttagtttaattaggtcccatttatttatatttgtttttgttgcatttgcttttgtggtcttagtcataaattctttgcctaggctgaagttcagaagagtttttcctgggttatcttctaggttttttatggtttcaggtcttagatttaaggatttgacccatcttgagttgtttttttaaaataagatgagagatagggatccagtttcactcttctacatgtagctatccagttttcccagaaccatttattaagtagggtgtcctttccccaagttatgtttatatatgctttgtcaaagatcagttggttataagtatttgactctatttctgtcttctctattatggtccattggtctatgtgtttacttttatgccagtaccatgctgttttggtaactgtaaacatataatataattgaaaatgtaatgcctctagatttgttcttttgcttaggattgctttggctgtttgagcactttttttcatttcatatgaatttcaggattttttttctaattctgtgaaaatgatgttgctattttgatggaattgcattgaatctgtaaattgccttggacagtatggtcattttcacattatttattcttccaatccatgagcatggaatgtgtttccatttgttggggtcatgtatgatttctttcagcagtgttttttagttctctttgtagagatctttcacatccttggttaagtatattcctaggtattttattttaatttttgcagctattgtaaaagagactgagttcttgatttgattctcaatgtggttgttgttggcatatagcagtgctactgatttgtgtaaactgattttgtaacctgagactttactgaatttgtttatcaaatctaggagtcttttggagaagtcttcatggttttctatgtatacaattacatcatcagtgaatagtgatggtttgacttcctgttttccaatttggatgcccattatttgtttatcttgccttattgctctggttaggacttccagtactatattgaatagaagtgctgaaaatgggcatccttttctcattgaggttctcaggggaaatgctttaaactcttccccattcagtatgatttggctgtgagtttgtgttatatggcttttattattttgaggtatgtaccttctatgcctagttttttgagggtttttaccataaaggaaaactggactttactgaatgctttttctgtatctattgagatgttcatatggtttttgtttttaattctctttaggtgatgtgtgttgcattattgacttgtgtatgttaaaccattcctgcttcactgggagaaaacccactagatcatgctgtattatttttttgatgtgctgttgcatttggttagctaatattctattgaggatttttgcatctatgttcatcagggatactggtctattgttttcttgttttattatgtcctttcctcactttggtatcagggtgatactggcttcatataatgaattagggaggattacctctttctcaatcttttcactaagattggtatcaattgttttttgaatgtctgatagaactcagctgtgaatgcacctggccctgggcttttattgttggcagtttttgtttgttatgaattcaatttcactgctttttattggtttgttcagggtttttatttcttcttgatttaatctagaagagttgtatgttttcaggaatttgtccattttctctagacttcctagtttgtgtgcatagaggtgttcatagtagtctcaaatgatcttttgtatttcagtgttgttggttataatgtcccattttcatttttaatttagcttatttgaaatgtttctcttctttgttaatctagctaatggtctatctagtttgtttatcttttcagagaaccagctttttgtttcatttatcatttgtattgttttcttaaatttcatttagttctgctctgatcctcattattccttatcttctgctagttttgagtttggtttgttcttgtttctctatttccttgagatgtgacattaggttgtcaatttgtgatctttcagatttttgatgtaggcatttagcaatataaattttgcttttagcattgcttttgcttcagagattttgtaacttatgtcgctattatgcttcatttcaaagatttttgaaatttccatcttgatcttgttattaactcaaaaatcattcaggagcagattgtttaatttccatgtatttgtataattttgagagttccttttaaaggtgatttctagctttattctcctgtgatctgagaagttgatatgattgtgattattttaaatttattaagaattgttctgtggcctaccatatggtttatcttggagaatgtttcatgagctgatgagaagactatattctgtgttttttggatagaatgttctgtaaatatctgttaggtcagtttgttctagagtatagcttaagtccattttttttttgtctttctgtcttgatgatttatctagtgctgtcagtgccacgttgaagtccccccgcgattactatgttgctacccatctcatttcttaggtttagtagtaagtatttttaaaatctgggatctctagagttagatgcatataaatttaagattgtaatatctttttgctagactgatttttttattattatgtaatgaccttctttttttattctttctgctttaaagtatgtttatctgatgtaagaataactactcctgcttgattttggttcccatttgcataaaatgtctttatccatccttttatcctgagtttatatgagtctttatgtgttaggtgagtctcttgaaaacagcagatatttggtttgtgattttttattcattctaccagcttgtgtcttttaagtggaacattaaggccatttatgttcaatgttaatattgagatgtgaagtaccgttccagttattatgttgatcattacctagatactttgttttcttctttgttattgttttttaagcaccttgagttttatgctttcaagagattctgttttgatgcatattcaccttctcttttaagatttagaaacccttttagcatttcttgtagggcagctctggttcataatttatgaaatttagttttactggatacaaaattattggctgacagttattctgtttaaggaggtatagataggaaccagtccctcctgcctggtaaggtttttgctgagaagtctgctgtcagtttgacaggctttcctttataagttacctgatgcttttgtctcactgctcttagaattctttttttaaacattggctttagatagcctgatatgtgtatgccttggtcatgtcctttttgcaataaatctcccaggagttctttgatcttcttatatttagatatctaaatctctggcaaggccaggaaagtttttttcaattattcactcaaaataagttttccaagctttttgctttctcttctcccttaggaacaccagttattcttaggtttgatcattttatgtaatcccatatttcttacagacattattcatttcttctgtttattttttctttatttttgtctgattgggttaattcaaaagctttgtctttgagctctgaaattctgtcttctagttggtttagtctattattaaaactttcctctgcattttgtacttccctaaatgtgtctttcatttccagactttcaggttgggttttctttaaaatatctttctctttagaaaaattttcattcatatcctgaatttaaaaaaaaattaagttagttttcacctttctcttgtatctccttgagtagcttaattatcaacattttgaattttttatttggtatttcaaaaatttcatcttggtttggacccatttctggagagctactgtgatttttatagttgggggtattatagaaccctgttttgtcatattgccagaattatttttctggtttgttctcatttgggcagattatttcttctgttattctttaatttgtttttgatttgactttttaaaaaaaattccttttgtctccattaaggatgtgactttaatgtttatactttatggtaacctaatgcagctcttggtgcttccaggggtgaagtctctgtatgagttccttggttatagagggtgtttgtatgatggctttctcaaatgctggttgttgcagtgtgcttgatgtgtgaagaagttcactctctcctctggggttggaatggcaaaggcctcttgaagcttatctcattcccctgtgctgtgaacatttttatgtatttattttttccacagtattttatttactgtgttgaatagttccagcttcaggccggtagagaaggtttccctgggtagaaactgggtgtggctaaagcaggtggataaatgcaatatccagtagtggacagaggtcccagccttgacagaggcaggtggagaaactctcagtgcaacacactgaggtcttatcagggggaacagtcggaggcacctgaactcccctgtcaggccagcaggaaagcagtccacctcctagttacactactgactcagtattttggctattcagatcagaccagcacaagttttcatctgcacaaatgtgcatattccaagtagagtggaattctaacacttgtgcaagcacgaacctggcgtgcactccacctgtggggatataatccccttgaattgttccagaaaggctgtcctttggtgtactcatactgacctcccatggaagaagccccagctgggtctgcagtgctggacaaggggcaaaacaagtcctcttctccaagacccttcatgagcaccagggctgcctgactgttggcatggagcttcagattttccccactgagcctggcagtgcatttgtgcctttgctgaaaggagcttcccatcagcagaaagttctgggattcaagttctgccatccagatttttttgtcccatgaggtgttcccttgatatagtgcacttctcattctgctagaagtagtatctctaaagacaagactatagtgaatgctgctgctcctctgagtctagccacccaatggggctgccacactctaggttggtggtggggatattttcaagggatccagtgttgtgacctattctgaggtcttccagaagcaggtactagtgccagctctggtgggggtagcaggggggtaacatagcctctgtgagatttattgattataaatagccttagtgtgttggctttctcaaatgccagttgtagtagtaatgaactggtcacatggacagactcaggacctcatgattagccagggtgttgcaggcaacagtgacagctgaggtcagacacaagtttttccatccttggtgctgtgttattctgcctgcagatgctataatggactgtgtcagttggcctccagccaggaggtggcgcttgcagaagagtgctggatgctgtagaagtggtgggatttgtgctctttttatgctacccaggggaagtactctggtttcttaggcaattggtggggtcatagaactgccaaaatttctgtctttcatgttaagctaccagaacagccggaggggcaaagccaggtgggggctgggtgggaaagatccgagctgtggttccccacatgtgggacaaacaagggctcctgtgagggcccaggggcggttctttggctactggagtaatgtttcagagaggagcacagctgcctcagctgtacagaagagtccatatgcggagcggggagtaacaggtggcagtatgttccactcagctccccacactggctaaagcaggtctcacatctgcagtgttccactagcagcagcaagctaagttccaggtagtttgcattcagaacttaaaactgcccgaggccataagcctgcctggtggagacagcaaccatggctttcaggccacagccgtcccagtctgccggcaaagctgggacgtccagctcctgtattcatggctgcagcacacttcccacttgcctcccatttctggccaaaggaatttgtccccgctcgagattatattgtaaatttcagttgggaacttctctcaacctgccacagtcacctgagttagctggcaggcttccacgaaatttcctgtgaagtaggatgaggaatggtttccctccatccgtgctggagactgggaatgcacacgtctcttcctgctgctgctcccacttttatattgcccacggctccctaaattagtctcagcactggttagggtaaggccttcccctgtagcctggattgccaggttctgcagtaggagtgtataccctgaaggcagtttatcccactcccacattcgtaggacttggttttctgcctggcttagaagatgcaggctgtagcctaccacctctttcaaagcatctgtgatttctttcagttttcttgttaagtttctaccttgcttcttgtaagaaaattcacggtgtgattatctacgtactcttttgtctttccaagtgagtgaggcatgataacagtgcctccagtctgccatcttgtagaaaaatgaatttcttaatacataactatgagtaggtacgttttttacaagttcagaatctaccttctctaaaatatcattcctaacttttggaatctggaccagatccttctatgtgctgtgtaccttaacaccatgtacatttctttatcatataacacatagtgtgggcttgtctactataccctgagacgataagattcttgaggactgggtcattatttataattacagatataaatttaaatctaaataaaactcactgcaatttttttcatagaagatacttcataaatgttgctgatatgaaaaattgaatctatgcccattgtttaattatcttcattgtcactgactaacttagtcttaccagcttaatacagtgtttatgaattatctcacagttcctgtggaccaggaatgtgggcacagcttagctggtacctctggctctagatctctcatgatgttgcagtcaagctgtcggctacaactgcagtcattcacagcccaactggggctgaagaggccacttccagattcagcctccacagagctgccttatgatatggaagctgtcttcctcatgaacaatcaatccaaagaagaaaaagtgatcacccatgatggaagctacgttcttttataaccaaatctaggaaatgtcatcccatctgtagtgagttgaatgttggcttccaaaaagatatgttcaaatcttaacctccaatacttgtgaatgtggcattacttggaaaaagagtctatgcaggtataatttaggatctttagatgccatcatccaggattaactggatgaactgtaagtccaaagacatgtgtatttaaaagatacacacagaggagaagaccatgtagagacagagtcagggactgatgtgatacagacacaagccaaggaggagtcaccagaagccaaaagaagcaaggaacaaaatttctactacagcccggggagaaagtgctacgtttccaacaccttgatttcagagttctggcttcccgaactatgagagaataaatttctgttcttttaagccatccactggtaacagtggtaatttgtcatggcagacaccaaaaacacaaaataaagttattgaagaaattgaagaaagtgattttactttcactgactttttagagtgtctgtttagtacatctatatatgtaatacatctgtgttaataatgatattcaaattaatcttcacctataaatgttaacattgttttttatttaatgaagaggtttaaagagaaagagttatgtatatttatgtagtatgtaattataattaataatccctttataaattaattactatttgaataaaatgatgaaacctagaaaagtggtttttcatcaatatgttgttctctgtgttgcaaagtgataaactgtaggccttttttagtctaaactagttattcatactatgatgtatcacttattacactgaagctttgactttcttagaggtcacattctttataaaatggcttaatttgcttttacagcatgatttatattgagaaaatttagtttggtgaaaaataaaaaatattttcatgagaataatttttgtgtgtaaagattgagctaaaggagggagaagagtaggatttgcattaatatctacaatgcatgaaaaaatggaagtggctatcttagagaaggaaattggcaaatcatgaattttaaattgcatagtttatcagttaggtagcctgacaatctaaactagaaactttttgatcaggcaaccatctgtgaaacaacacctatttatacaagcaatctgtgctatgtactaatcacatctacatttgaagagtctcttattcttagatcacaagtaacagaaactagttctgtctgtttaaacaaaaaatgcattttgctgaaaggatataacttagcacataaaatttgagggtaatcagatgaaacagttctcagaaaagacaggagccagactgttctaggcatctagagatcaggaagtggagagaaacagcagtgggtacttctgtggagctaaatatggaccaatagtattttttaatgttcttcctctcacactcacaaagggagtcagaatggctgagtttgagtcatttgccccctgccaggaaccacggcaactgattaacagttctcaaaagactgcctgtactaggagagagtaggtcccaaaggcaactttaaagttctggaaccaagacggagggcgaatatgggggcaaataaaaacaatagatacctcctaaaactctttttcataagtgttatttaaagccatcaaactgtccaggtgcagtggcttatatctgtaatcccagcacttttggagtctgagatgggaggattgcttgaggccagaactttgagaccagcctgggcaacatagacccctgtccctacaagaaaaaaaaaaaaaaaaaaaaaaaacatcaaactgtaataacaataaaatgtcatataataaagattttgccagtaaagtgagtataggtgaaataataatgttgcttagttctcaataggtatctactatcttgaaaaattcatttgttctttcttgtgtacatacttgtatttactaattgcctatcatatgtcaattgctatccttgacaatgagcataacattataaacaatggagttattccttgcttttatggagtttatagtctagtgaaatagaaataaaaccactaatatattgcaataagtctaagataggaggcatagaactataaacagagtggcttaaaacaacaaaaattcattgtataacagttatggaggatagaagctcaaaacctaggtaccaggggtcactgtccctccaaaggctctaggggaggatccttcttttttttccagcttctagtggctccttgtattgcttgattttaggcaacataactccaatctctgcttccatcttgacatgaccttcttccctgtgtttctctatattctttcctcttcttataaacatatcagtcattgtatttagggcccatcctaaatccagaataattttatcttaagattctgaactgattgcatctacaaagaccatatttccaaacaaggtcacactcagaggttctgggtgaacatgaacttttgtggggcactattgaactaccatagtggggtacattgttctgttggtgttcctagcagggtctgggtaagaggtggagaggagagatgatggtgacgaggctagtgtaacagatggtaaggaaacatgtaagggatttgacattatcctaaatgtagtggagtgccactggagggaattaagcaggtggatgacctaatcagatttgtgttttacaaagatcatattggatacaatgtggagacaaggagtaactaagcaatgctggaagaaaaaagctagctaggatattctatagtaatttaggtttgaaatgatgatgacttggagaaggacatgctgttgggaatgaagaacaataaattcaattctggtatgtttacaaaagtggaatgggctttgtgtgaattagagacaaaggatgctagaggaatcacatgtaatatggcccaggctgctgggttctgagactatgtggatgaaagttctaggctctgaaattggaagagagtggtgtgtttgtgtgtgtgtgtgtgtgtgtgtgtgtgtgtgtgtgtgtgtgtaagagagggagagagagggtaaataatgaatcagttttggatatttcttttagttttggttgctgtgagacttccaagtgagcatgttcaatagccagttgtctagtggcctgtatgagactagtgatgttgaataaacaaatcttagtatgttagtatataaatggtacctgaaattgttagagaattgaaaaaagtatatatgattactatagccaataaaggagtattatgcggaattaaataatgacatatagaaataatttttaatagcatatgaaataactattataaaaagctgagtgaaaagaagaaaactaggacacagctgtatctatagtaagatctcgatactatatatttggctacttttaataataaacactataagtgaatgcacttaaatgtagtggctatttctgggtgcttttatttatgtatttatttttacttatttttaaagtacagtgtgttcaatgagcatatagtacttttgtagccagaaaaaatccaatttttataagttgttagcacatataatgtacctgaaattggatattcatagcatggtatttttaaacatgagtgattaatttcaaagattgagcatcttttgatttatgagaaaaaaaagttgtgggagaaaaaggattataccatctgagccaagtatttatataacacctcaaaatatatatggggatagtattgtatgtccttaggttaagtagctatttgagaaatcaggataaaaatgctacttttggacataaagtagaaaataactttagcttgaagcatttttacttgattttgcaaaccatatctgtgaataagcaatttaataagacacagaaatagatcattttatgtaagttgtcattagtaataatgccaggttgccttatgtaaggtgattagacataacattcctgtgcagattttactaatttctgtaagactttaatggtatttagatttctggaatgcaaagctaaagctttaatattaaatctactttacatatccacgggttgtgccatgagaacagaacgtatttgcacattcttcttttctctcccttcccctccccttccaagtttcagaatattaattattccattaacacgtaatggatgatatgatgatgcgtttaaaacactcacatcatctttaggctattttgatggtaacagaggataattaatgccttgtaataactttaataaaaggctgaaagccggctagtacctacagtaaggaaaatcatttgatacttatgtaggaggttttgttttgttcttcacgtttttgatcattgcttaggtattattatttgctttgactcctcaataaaattatttactaaccttgacctgggatgaagcataaaaattttatcatttaagtaagctacaaaactcgaacattcttttacttgctgatggctatgaaataagcagaccctctttctttaaaaataattttgaaaagactctagtaatagatatactagaattaaattttttggttagttttttataaaaatataggtaataataattttgatagaaaagaaacaagcttagatttcaatagagatttggagtcttttaaagcgagtttacattacttatatcctttaattagactatgctgggaatgtttaaatgactttctctatacaaaattttggcttagttaggagtacaaacttggccttcctctagactatctatctgcttaataggccttttctttcccccttctagagtggaattttctaaattcctgagtgagttttgaaatctgccctaggatttttaacagtaataataataataataatggccaacacttacatattacattgtatatgtcaggcactgtcctaagctgtctgcacaaattaacacatttaatcttcatagggaaattttgtttacagatgagaaagcttatgtacaaaaagggaaagtaaatttacctaaggtccaatggcaaagatgggattagaacccagttgtagtccttgttttattcattacatgctactgcttgtagaaggcatacattaacatgagagaaagtatatcaatccaaaaatgtcaaacacctagtcagtattcccttgtcatcttattatgagactatctgacattcagctctatgctagacatattacatatttaatcttctcctacacttttgtaccctaagtctctcatatttcattcatttcagattccttaactcctctctcctaatactcgttttatagttttatttacatgatttctagtatatatcattacgaagagattccaaggtaaatctcttgtttttttaattaaaaaatgaaaatatcattttgagatagtaacacataaatatattgttacgtgccctaaattaacatgaaggaaaacaacagtagtaaatgcaggataatgaagtgattcaaagaacttttggtatccccttttataatttaaacttacatttgataaatctatgataaacgaagcacacacaggactcttccacttatacttcaaattcttagatagaagaaaaaataaatatggtatatataactcacttcagaactatgcaggaaaataaatcagagaactctcagtagaccaaaaagtatgagatatccagaaaggagactgtattagatttgagaaggaagccacagctaaatctatgcacaggggaggactgtcaaccaaaaggtggctgtggcactaagtctgtaccatactgagaaatggtaggctcctgatttttggaatagcagtgagcccagggagaagtaactcattgctaagttgggacacagcagaggagcaatcaagtattcaaacctgaaaatctcctgtttatcttctgtggtctagacagcaaggatatgagtttggactggagaaaaccagtgaagtattcagatgattagcaatggtgaggatgatctgggaactcatttccaggacactcactactgaaattgctctttttcagtgtgtctcaccattcccccactctcactaaagacagacttatagcactgagatagcaagagttaataaagtaagtagagtgcaatatatatgtaacagcagaggaatctaagaatctaatctaagattcctaatctaaaagggagtcaagcagaaaaaagtgaacaaaaaatttgatcactaatgtttttaaaagaaaccctcaataaattcataattataaagactggttgtcagcaagatgggctttctagtgcttgctcccccactgaaataacaatttgaacaactatccatgcatgcaaataccttcagaagagctaaggaaactgagtgtagcatagaaataagatgcatagaagacagttaaaaggacagacactctttacattacccgcatcactcattccccaaccccagccctcttggtgtggagacagatactctctacttggggcaaggagagagaagtgagccctgggttttgcctcggatctgaacactgggtccaccccaggaaaacccagtgttgggcaggtttccaaagcctcagactccaggttggaatctgcagagtgagtcacaaggcctgccctggtaccaggacagatccctcagcctcaggcttcaagcttgccaaggggactttatctctgggcccaccccgttgttaggctgacccctgtggccctaggccatggactggtccagcattagactggtcccagcagccctgggctttgggactaccatagaccaggccagcccccgagtctccatctctaggctgccacctgtggacccaggctgcaggcccaccctaggttccagaccagctccaagccaggttggcccatgcaacccaggcttcagggccaccctggcatcagatcagcacccttgacctcaggtgctaggctttcgactgtagacacaggctctaagcctgcctggtgccaggctggcccctgtggctccatcctccaggctagcccttgtggttgcatatcccagcagactcagccagggtctgggactgttccagctgatccagggtccaggtccacctcagtagattccagaaactgggcttagccccatggacctaggctccagaactgctcccatgcgaggtttcagactggtctctgtggccccagaattaaggccagtgcttgcagacctatcctctaggatagaacccaaacacccatgcccagcctggccccatggattcaggctccaagttggtccccaaagccccaggctccaggcctgcacccatgatctcagccccctgattggctctcacagactcagacatcatgtctttcccagcacaggtcagctataggctctaggctagttcccatggcatcaggctttaatagattcagggtccacacctgctccagcacacccaagctctaggcccagccctatggactgaggctccaggcccactccagcctcaggtcagccctcacagacttaggctccaggcctgtcctagtgcctggctggcccctgtcagttcaggcacaagacccactgcagtgccaggttagctctgttggacccaggcttcaggccagccctcagtgatgtaggttccagacccaattccacagaacctttaacagctccatgccagtggatccaggccccaagcttacattcagggactcaggcaccaggtctgcccattgcattgatgcagttaccaggccagcttacataaggaccccagcagcaagcctgcctgtggaccataccaaatgatctactcagaatttctggatgggctgattggtgaaggcttacccaaacaaaactagtctgcaaagactggaaaagtcctggtttcttcaaatgtgcagacatcaactcatgccacaaggttaagaacagtcatagaaacatgacatcacatgataaaatgaagttccattaactgacactaaagaaatgcagatgtatgaaccaactgaaagagaattaaaaatacggtcatgtcacttaaggatgtagatactttctgaaaaatgttcactgttaagcaatttcatccttgtatgaacatcatagggtgtacttatgcaaatctagaagatatagcctactatgcccctatagtgtagctgattgctacatatacctatatggtatatatcaaatagtattttgtgccatatacctatatggtatagcctattgctcctaggctacaaacctgtacagcatgtacatactgactatatgcagaatactataggcagttgtaacacaatggtaagtatttgtgtatctaaatacagaagaggtacagtgaaaatactatattataatcttatgggacaggaccaccatcatgtatttggtacaccattaaccaaaattttgatatgcaacacatgactgtaattgttttaggaaagctcagtgaagttgaagaaaaaacaaaaatacaatccaacaaaattacaaaaataatggattactaaaataaatttaaaagagaagtcaaactaatttttaaaaaacatagaaattatggagctgaaaaatacaattaatgaaataaaaaatgcaatagagagtgtcagcagcagagttgttcaaacagaaaaaaaatctgtaaacttgaagataggttattcgaaaatatacagttagagaacaaaacaaaacaaaaaataaaaaggaatgaagaaatattacaagacttatgggacagcatcagaagaacaaatgttcaagttatcagagttcatgaggaagaaaaatacaaaggggaagaaaatttaaagaataagagaacatttaaagaaacttatttaaaggagaagaaaaagacaaaggggaagaaaactttctaagcctggtgagaaataaatatccaggtacagaaaaatgaaaaatctctaattagataaatccaaataaaagtataccaatatatattataattaagctgtgaaaatcaaagacagagaatcctgaaagcaacaagagagaagaaacatatcacacataagggagtttcaaagaggccagcagcaaacttctcagcaggggcattccaggccaggagagagtggtgtggtagcttcaaaatgctgagggaaaaaaactgccaaccaagaatattttacctggaagagctcttctttagaaatgaaagagagataaatacttttcaggacaaacaaaagctgagggagttcagtaccaccagacctatcttacaagaattgctaaatgaaattctcaaagcttaaagaaaaggatgctaattactaccatgaaaacaggaaaatataaaattcactggtaaaagtaaatacacagtctaattcagaatattctaatcctgtaatggtgacatgtaaatcacctgtattttcagtatgaaagctaaaagacaaagctattaaaaagtagtaataactacaataattatttaaggattacacagtgtaaaaggatgtaaattatgacatcaaaaacataaaatgtgagtgatatggtaaaagtgtagcatttctgtatgtagtcaaaattaattttatcagtttaaaatagcctcttttaactgtaaggtgtcttgtgtaagcctgctggcaaccacaaagcaaaacctctagtaaatgcacaaataagaaaaagtagggaatcagaacatactaccagagaaaataatctcaaaggaagacagcaacaaaggaagaaaggaacaaaggatgtacaaaacaactagaaaaatattaacaaaatggcagtaataaatcgtttcctatcaataattaccttgaatgttaatggattaaattctcccatcaaaagacatagagtggatgaatggattaaaaaaaacaagtcccaactatatgctttctacaagaaacttatttaatttttaagtacacacacagattaaaagtaaaaggatgcaaaaagaaattccatgtaaatggaaaccaaaagagagcagaggtagtgctgtgatttgaaaatgtcccccaaatttcatgttgatagctcagtccccaaattcatatgtttactggaggtagggcctttgggaggtaattaagattagatgaggttatcagggtgaggccaatgagatgggactggtgtctttacaagcagcagaagagagaccggagctaacacatttgctctgtcttgccatgtgatgcctcccaccattgtcatgatgtagcaggaaggccctcaccagatgccagcaccatactcttggacatctcagcctctagaactgcgagttaaataaacttctattgtttattatttacttagtgcatggtattctgttatagtaacagaaaatggactaggacaggtaactatacttttatcagataaaagagacattaagtcaaaaactgtaaaataagaaaaataaggtcattatataatgacaaagggaccaattcatcaataagatgtaaaatttttaagtatatatgtaccaaacagtggagcacttaaatatatgaagcaaatattaatagacctgaagagagagatagactgtagtacaataatattaggggactttgataccccactttcaacaatggacagattatctagacagaaaacaataaggaaacattggacttgaacttctgtttagaccaagcggaccagacagacatataaagaagattctatcaaacagcatcagcatacacatttttctcaagtgcacgtggaacattctccatgatagatcatatcttagatgatgatacaagtgataacaaatttaagaagaatgaagtcatttcaagtatcttttccattcacagtggtgtaaaactggaaatcaatcacaggaggaattttgggaaataaatatgtggtaattaaaccaacgggtcaaaaaagaaattgaaaattaaaaaatatctttagacaagtgaaaatggaagcacaatataccaaaacttatggattgtagcaaaacagttctaagaagaaagtttagggcagtaaacaactgtatcaaaaaagaaagaaaaagaagcaacctaaaattacaccttgatgacttagtaaaagaagaaaattctaagcccaactcagtagaaggaaaaaaataataaaaatcagtgcaaataaatgaaatggagaataggacaacaataacaaagagcaacaaactaagagttgtttgtagaaaagcaaaatgaatcaacaagcctttaaactaaaaaactcaaataaaatcagaaatgaaagaggagaaactacaactgataccatggatatacaaaggatcatgaaagactgctatgaacaacaatataacaataacttggataaggtagaagtaatggacacatttctagatatattcaacctacttatgctaaatcaggaatcaacagaaaatctgaacagaccaataatgaataatgagattgaatcagtaataaaatttctcccatgaaggaaaagcccaggacttaatgccttcattaatggattctaccaaacatttagataagaattaataccaattcttttcaatttttttttccaaaaattgaagaagaaagaatacttccaaactcattttatgaggccagcattacctcaataccaaagccagacaaagtcactgcaagaaatgaaaattacaggccaatatccctgatgtacatggatgtaaaaattctcaacaaaatactagcatactgaattcaacagcatgttaaaagaatcattcaccatgatcaagtgggaatttgtttggtattcaaggatgattattcaacatatacgcatgtaataatgtaatataatacaacatagtaacagaatgaaatccctatgaaaacagcaaaagaccttgaatagccaaagcaatctagagcaaaatgaacaaagctggaagcatcacactacctgatttcaaaatatactacaaagttacaaaacaggatggttctggcataaaagaacagacacataagccaatgaagcaggataaagtgcccagaaataaattcccacatttacagttaattgattttcaacaaagattccaagaacacacagtggagaaaggacagtatcttcaataaacagtgctggaaaaactggacagttgcatggagaagaatgaaattagactgtcatttcatgtcacatacaaaaataaaaaaaaactcaaaatgatttaaagactcaaacataagacctcagactataaaactactagaagaaaacaaaggggaaaagccctgtgacattggtttgggtaaagatttattagatatattcacagaagcaaaggcaagagtaggcaaatggtattacatcaaaaataaaaggcttctggatagccaaggaaacaatcaacaaagtgaagagacaacctatggaacgggagaatgtatttgcaaaccataaatctgataaggggttaatagccaaatatataagaaattcaaaaaactcaatggcaaagaaacaaataacccaattaaagaatgagcaaatgacctgaatagacatttctcagaagaaaacatacagatgaccaacaggtatatgaaaagatgctttcctcatgactaatcatgaggaaaatgcaaattaaaaccacaatgagctatcatctcattagacgtaggaagagcccaaagtggctatgtggcaatcttaacttccagtttaatggaatcattgttgtgtcctctggaactaagacctctaggttagcagatggaagaggtctgtgggagttcactcaggctggtgggaaacattttaaagatagttataagaaataggcacagaccttcatggaaggctgggaggtttgcataagctccagtaatagatctggctgaaggcagcctaatccttaccttgagtaaataacttaaagtagatacagaggaatgtaagggagtttagctaaatagcttgtttactcatgtggtcataagacctacttttgattacccttgggtgcataattgctctctacttgggaggtcggcaatgtcaattaccctctagtggtgtttactcaagacctttgtcatttaatctatagtgaataaatgtgagcttcactggctgatcggggcatggctgtgactctttacagcacccttcttggtgtctgtgagtgcccgggaccctcagccagactgacaagcaaaatatctgtgtcagcgtatgttattcatccatcgttgggtcagggtctgtgggacagacccccgcaggggtccagtaaaaacctgtcaccaagtagctggctgatcagcctggatatggtgccatatcgaaggcttagtgttggtctctgctgctgacaaattgggcactcagtggtggccatagccaggtcagacttgatgagtggaagtccatgttgctgagcccatgcctaacctccatccctgccatcatggccactttgttcacgagtccactgggtgatgaaaggggtggctggggaaataggctgagtggtgtccacagaaagggtcatcctacccagttgattattaaaatcctcctcttctgaggtcaccctttgttgagcattcacgtaagataacaaatatcttcactttgtttttaaccactaagagaatttcatccacatacctcttccccaaatgtccttgtttccaatttttcaatcatgtttcttgcaagttcctgaccatccagccaaaccattggctacagcccatgaatcagtatataatcacacatctggccatttcttcttctgtgcaaagtgcacaacaaggtgcactgctcgaaattctgcccactgggaagatttcccttcttctgtccttcaggtatgtcctagaaaggggctctagtgctgcagctgtccattttggggtggcatctgtgtattgtgcagaaccatctgtaaaccaggccctagtcttctcttcctctgtgaactgatcatagggaactccccgtgaggccatcagtgcaggctcagggagagaaggcagggtggcaggagtggataccatgagcctttgaaccacttccttatgtaacttacttgtgccttcagacctgcttaagttcacaattccgctgagctggggaggcctcaggaaacttatagtcatggtggaaggggaagcaaacacatccttctcatggcagtaggaaggggaagtgcccagcaaaagggggagaagcccttataaaaccatcagatctcgtgagaactcactcactttcatgagaatagcaaaaggttaaccgcccccatgattaaattacctcccacgggtaatttaatgcacgcctacccttccttaccttcattgtgaagtaatagtgtgatttcatcttcacatccgcttcagtgaccccagctaacactgtaactctcttcttagcctgttgactcagaggtaggaagagcccaaagtagctggtggcaatcttaacttccagtttaatggaatcattgttgtgtcctctggaactcccacggtttccctcccataacacctggtgattatgggagccacaattgaagatgagatttgggtggggacacagccaaaccatatcacaaaccctttacgatactgttgaagtggtattgggcatcttttatccacttcccttgagagcactccgtatactgccaaggagacttgaagccttttgaattccattgttctttccaactttgcaaaattatttgagttcaccaatgaattaagctattttagtaacaagtaggtatgatttcatgtgacacaggaataaagtcaatcacatatattatttaatgtatgacttaaaaccccactctttagtgcctgctttgtttctggtactgatataatttgtactttcatatgctgtatccagaaactcaactcttaaaaataacttaccaaattttttttaaaatcttaaaaaataacttaccaaatctattcacagtgcagaggagaaaactaaagtctagaggattaagtgatttgtccaaatacattcagcaatgtaacactggagacagttaaactcaggctcttccgattgaaaattgatcattttttcataatacttttaatatatgttatgatttatgcatattgctgaaattttcagaaataatatgagatgcataagagtgcagtctaagatgtggcttcttcacatcactcgttgggatcactgggtcaaatggtgtttctagttctagatccttgaggaatcgccacactgtcttccacaatggttgaactagtttacactcccaacagtgtaaaagcattcctatttctccacatcctctccagcatctgttgtttcctgactttaatgatcgccattctaactggtgtgagatggtatctcattgtggttttgatttgcatttctctgctgaccagtgatgatgagcattttttcatgtgtcttttggctgcataaatgtccttttttgaaaagtgtctgttcatatcctttgcccactttttgatggggttgtttgattttttgttgtaaatttgtttaaggtctttgtatatatcttaagtattttttaaaattctcattatgtgtgcaattatttttcctccgaatatcagtctttcctaacagcatgtaagctccattggggtatagtttatttctgccttgttctttcctatcataatgtcagccacaatataaattcctagtaaataatgcttacataaggaattgaaagatagatgtgttactaattgtaaaggttggttatttattgagagagctaaggcttacccttttcatataggtgggttattttgtgtttgttaagagatgttcctatttcaattttcttgttcaaaatgaattttttaatgcattaaaataaagttagtgttgccttgtaaaaatgggtttagttggaatgattcattgattctgtaatcccagcaagttgggaggccgaggctggcggatcacaaggtcaggagtttgagaccagccggaccaacatggtgaaaccccatctctactaaaaatacaaaaattagtcaggcatggtggtgcgtgcctgtaatcccagctactcaggaagctgtggcaggagaattgcttgaacctgggaggcagaggtagcagtgcgctaagatcacgccactgcactccagcctgagtgacagagcgagactccatctcaaaaaaaaaaaaaaaaaaaagaaaaagaagagaaatggttcattgattgatttgtatatatttctagttgatggccagtttttagtttttgttatatgtcttctttactgaaatttgggtcatattctttgcgaagaagctacatgaatacttttaaaaataggaatattaaccacagttgtgtttccatttgacaaataatttttatgatttattagtatgaatctagccagcaggcacttgttctaaatcataacacttcagtaatcttcattggaaaaaaacataagttgtgtattttttagaactcagtttagcaagaattgagtaaaggatttgaaatataagatgcttgccctcccagagtgctcaaaagaatgccgaagctggaaaggctaacgtgtcagtagcttggcaattcccctgagaactccatactattaatcattaaaggagtttttgtaatatgtcaggggcttacaattttgctgtattatgaaaacattttgtgacaggaagataatttcaatttctgtgttaatgaatctgtgtaaaaattttaatcacacaattacagaaagagttctggtctttggaaaacaaactttaggtaattagagtaatttataatttcttaagtataattaatctgcctggctattttataattataagatgggattttaacagtgaataggtggtgtctgagggcccctttcaatgcctttgtatgaaatgataatttatggccttatggaataatgttatatcaagagtaaatatgtttccatgtagaatgtcttaagatgttagaatgcattgtttaaagatgatttatagcagtatttaagaacttaagcagcactggtttcatttcacaatcccagaattagtttacaaatacctaaaattctttactatagattaatatgatactgctaattttcttcaaaagtcctttggatcttttgctagagaaaggggtgcatttaaggaaactacacatttcacagataaagagcacaatttggggacttagaaaaaaagattatagaatgaaggctactttggttcctatatctcagggctaagtagaatgatatctgatgaaatctattccatctcagaaataaagcaactttatctcagaagattgcagggctgtacatatctgtctgtgaaatgtagctggagatactgaaaagtttaatggtaattcctgggggttagttttttgaagacccccatataatttggagagtgtgccacttactctgcgccttagaaaattaaaaaaaaaaaagtaagtttggggaaaatgttaacatctgtttaaatcttttgtcactgtagagcaaagctgaaaaaaggtattgcaataggaggcacaaatagaagaaccttgagtgtgatcttagaaaagaagacatggatgaatataggtgaattagaattgaagctgatgccaattttctgattgtaagtccatctttttccattataggattaaaagcacaagattgttaagacctgaaaacacatactaattgagtcctgaaactgagtgttagagtaataatgaaaggaaaatactttcattatttcaaaataccccaaggtaccttggattgagtccgatcattcccagttaaacattaattccattgtttgcagagtgatacaagtaaccaagatgccccagtgctctgttagaagattgttgattgacaaagctcctttctgcaaatgttttgcccattctgtgactaattcataaaagtttgtttgttttatttttaaccaatgaaaagagaaggaaactatcatctagaataaagtgggaatatactttagaatttttattaaatttatctttctagcatttcttattaagcagtgtttccactcttcaaaatgaaattcttcttaggtgatttttctttcttcccctctctctttttcctcccttgcttcctccatctttttttctcccttcccctgtcccacactactttcttcttttttctcttccttcttttgtttttcctttggggtggggtattgtagccctttcaaagtgatgaaaatattctatgattagattatggtgatagttacacgactttgtaagtattctaaaaatcattgaattgtacattttcaatgactgaaatcactgaattgtacattttcaatgactgaaaggccaactagaggttaactaaggtgactggagtgggtaaaatacagaacagccagcagcctattctcatctctcatctcagattgattacagcaaatcacaaggctagacactcagtttcaggactcaattgctatgttctttcagttcttaccaattttgtgctttttagtcttgtgatggaagagataggctgacaatcagaaccttggcatggatcacagctttaattcacctacatcaatttgtggtctttgtgtcctccatcctgagaaaggagactgtctgtgataatttagagacagatttgatctttatgaagataagcaacaggatagtgagctcttgaacatatagtagttagtagaaaagtgaacaaaaagcacacaaaacacttactgagtttaatcagatatagttaggaaaacagtttgagtatttatttttgaagtctagtagactgtattcattctgaagtaaatgccatgtcacaatggtgaatgaaaatttagtttttgaaaaagtattgtatgttcggtttttgaaaaaattttagatacctggaaaatactctttgtctacatcaggaagtttttcaaaatacctgaaagttaaattccattataaaactaggacagtaggaatccatgcatcaaaatatatttaaccttatacaaatacaagattgttttgtttttattgtgctgtcaaagtagtgtcagtttggttgcttttggtgccttgtctcatttattatgacaggaagttccttttcccattctctcttaggacatgatgtggctgcatcttgattgactatggatgtttctgcagagcttttaaagcatggctcattggattataaagaattgttttgttatatggttgctcaagctagtgcttttgcttgcattaccccaaagtttctttgtcacttacttcctgtgcagaagttgtctacctattctagattatggaaataactcagatgagcttcgtcagcaagaaggaagatgcatttaacattttttcccaaggctaaactatgtactataagttattcgaattagataaaaacaggaaaaaaatatatcactatagaatgtctagaaaagtggtttatgtttgttcaactgttctttcatttaaaaatatttcacttaattaaaaactattctcttgtaaaagataagtatatttaattttaatgaaaatttggctcaatggaattttgactgcatggaaacaactgtttaaaatgagaattcaaaggatccttattgatgatctagtcttacctcctcattgacaaagagtagatttttacttttagggaagagcttatatttccctcatttgtatttttttatttgtattttattttattttttgaaacagagtctcactgtcacctaggctaaagtgcagtggcatgatcatagctcactgcagcctcaaactcctgggctcaagtgattcttctacctcagcctctcaagtagctgggacttacagacacatcatctcacacagctgatttttttttgtttttttgttttgttttgttttgtttttttagagacagagttttgctatgttatctggccacgtctcaaactccaggcctctagtaatcctcctgccttgccctcctatagttttaagactataggtgtgagccaccacatacagtctgtttttatttaaaaaaaattaaattgaggacttgaagtttttatttaggattaaaggatagtttttaaaatttagtagagaaacacattatttcactggaaggtagtttgccaaaatatttacaatgcttacctctgattggttagattacggtttaattttttttcattttcttttgtgcttcacgtgtttcatgatgaatatattacttttgcagagatgaaatgacattttaggcctggcacagtggctcatgcctgtaatcccagcactttgggaggccaaggtggccggatcccctgaggtcaggagttcgagaccagcctgggcaacatgacaaaaccctgtctctactaaaaatacaaaaaattagccgggcatggtggtgggcgcctgttatcccagctacgcaggaggctgaggcacaagaatcagttgaacctgggaggtggaggttgcagtgagctgaaatcacaccactgcactccagcctggggaatagagccagacaatgtctccaaaaaaataaaaaagaaatgacattttataaagtacattttggctttaataattaatgtttcacaattttagatgacattttaaaaattgtagtaaaaacacaatgtgagatctacctttttagtaaacttttaaatgtgtaatacattattgttgactatagctacaatgttgtacagcagatatctaaagtttattcattttgcttgactgaaactttattcccgttgattattaactccccatttctcctcctgcagggcctggcaaccatagttactctctttgattctgtaaatttgagtattttgttaatacatacctaagtggaattatgtaggatttgtgtatctgtgactggcttatttcacttagtacagtgtcctcaaggttcatctatgctttgcagattgcagaattttcttttttttagagttatttttaaacgtatatgccacattttctttattcattgctcactggacatttaggtccacctcttggctaatgtgaagtgttgcactgtacataggcatgctggtctctctttgagatcctgatttcaattattttggataaatatccagtattaatttctagaacatataatagtttttttttaagttgtttgagaaacctctgtactttcatccgtaatggctgcaccattttgtattcccatcaacagctgtgtaagagtcccaatttctccataccctggtcaatacctgttgccttttgtctttttgataatagccatccctaacaggtgtgaggtgatatctcgtggttttgatttgcattttcctgttggattagtgatgctgagaaccttttcatgttcctgttggccatttgcatatcttttttggaaaaaatgtctattcagattctttgcccattttttaattgggccatttgtgtttttttttttaatattgagttataggagttcttttatattttggagattatcctcataatatatgtgtcttgcagtatttcctcccattctatagtgcttgtttttcacgcattgttgattgttttctttgctgtgcaagagctttttagtttgatgtagtcccacatgtttattttgttgcttgtccttttggtgtcatctgtaacatcattgccaagaccaatgtaatgaagcttttctcttaggttttcttttaggagtttaacaattttgagtcgtatgtttaagtccttaatctattttgagttgagtttagtgtacgttgtaagataagggtacaatgtcactttttttgcatgtggctatccagttttctcaacaccatttgttgaagagagtatcctttcttcattgtatgttcttagcacccagatcaattgactatatttgtatgggcttatttctgggttctgtgttctgttccactggtctatatatctgtctttgctctggctccatactgttttggtgttttgtaattaatacattttggtatcaagaaatgtgatgcctccagctttgttttttctggattgttttggctatttggggtttttgtggtttcatatgaattttagatatttgttctaattttgcaaaaactactattgggattttaatcagaattgcgttgaatgtgtagattactttgagtagtatgaatattttaacaatattgtctttcaataaatacaggatgtttttccatttattcatatcataatttcttttatcagtaatttgtagttttcagtatacaaatctctccttagttaagtttatttctaagtattttattattttggaaatgttgtggccttttcactcctgtagtttggtgggcaggagtgttacagttctgctgccctcagctcagcgagcaggagcattacagctctttcactccgacagttcagcaagttctgagttcttgtcccgtgaccaggaggaataagacacgtggacaccagagagggtgtaagtcagaatagaatttattgaatgaaagtaaagctcttgacagcaagaggggacccaaaagtgggtagctgtctgtgaggctgagtccagggtttttatggacttagaatgtgggagtgcatgctgattggtttatgggtgggctgggaaaaggcaccattcatttggtaaaagggcataattcagaaagaaacaattggcagagagtggatgagatgaggaaggaagttcttactccagtctgtggattgtatctagagtggtagctcggtttttaggctttagattgtccttggcttgaaggttaagtttcactggggacctgtccctatctgtctgggaatttgtctgtctcctgtcgctatcagtactattataaataagatcattttcctcatttcctctccagatagttcatttccatttctattcaacataatattggaagtcctagtcagagcacttaggcaagaaaaagaaataaaggcatccaaattggaaaagaggtaaaattctccctatttattgatgacatgatcctatatgtagaaaacttaaacactccattaaaaaactgttaaaactaataaacaaattcagtaaagatgcatgttacaaaatcaaattacaaaaatcaattgtgtttgtatatccccatttttaaatttcaaattcgtcaacaataaatttaaattagacctatgcctgtataaattataaacttttatatatatgaattgaaattaatggtgtttatattttaacttgaaatatttgtgcattcatgtatgtattcataaatatatatgtataaaacaaaggtaaaatatataggagatttttcttttaaagcggtttttactaaaatttcagaaataaaaaaatgagaggttatcattcccagccctttattgttagtacttttatcaacctactttacatttatcaatcacttaaatgttttttgagtgcccaatatgtgtcaggctaaggcttaaaaccacacacaaaggatagcttttgcaaatcttttgatctggtagagtgctaacatgcatatatgaagaatttcagataatatgatagattatatagatagatttatagagagtggagtgaccattcttgctggggagtgggccactccaatgcctgcttaatttggaaaggagctttagaggcagagggacaagtaatgctgaagaatagatgtatgaaggactcaaagcagaagaatggaaaatccgatctgtaattttagaaatatcatttgaactttatccaacttccaggagtgaaaacaccttaaccagtgttaaatagctgtttcttaatttgtttttattcaaagaaaaagtatcggaccaaaacctctgtttttatattttattgtacttatttatatttcatgtgtgttaaaaatccaaaattaaaaagaaatattcgcaacttaaataatcattgactaactgctggacacacttttttttttttttttgacctggtctttcttgacataatctaccttttcatttctttttaaatgtagtttttaatcaatcatgttgtatatcttttaaatattttatttcttcagctcaaaattctcctaatttttttcagcctgagattcataattttttaaaagtgctaattagtgattaatatacccaggaattattatatcactggtcctttgaaactttataaattttgatgtattgattggttaatttctaagaactagttcaattgcaattgtacttgcacaggtacatatgtatatgtatacacacacacatatacatatatatatatatattcataattaaatttatctctgaaactaaatatagaccttccccttaaccccctcctttacttaaatagccctgggaaatttgatatttgatttactatttagcgaacatgtaatttaataatgaaaacttaagatttgcttttcattttaaattatgaaactctgatatgttttatttattatgtgcacatttatttaaaataaatagagcaaacattcaaatttaattgataattttgatacaatttttaaaatccatgtttaaattcaagtgggaatttttatttttgaaaatctctgaggcacattataaataaattttttaaactactatgaaagtaccttttcctttattaagctttttccagtattctcaggttatagatataataaaactctttttgcttactttgtgaccatacatgagaacagtggaggatctctgtgcctgtgctaattagaggcaccctccttgtacagcactatttaattctctgctctttcggtttccagatgcctgtactcttcaaacatctctttgacctgtagactgagaagcactacccagaacttgagatttccactaatctctagtgctatataatctgcttttcaagagtcaactaaatttggtttcttttccttgcctacctatttccagtttattcactattctacaggatgaaaggaaaatcaggttccaccagctaagggtgaactttggagaaactctatgttagctaaataatcacatctttcttttctgttgcaccacactcaaaatagcttagtaaattagtagcttagtaaattattattataatcatcttattttaaaagatgaagaaatagctttatttgttgaaaacagttgaatgtgtaggaacaattatttccactttatggtactaatggaaaaattaaattagacagtatatgatttttcctaggcaatataggtaatgatagtgagaattaatacctatttttccaagtaatattctttttgctacacagtgctgtttattattatatatgccttcattattttgaaataaaacaattgttccattcagagattacatgattatgattcaattgcattttaagagtattatattcttttaaaacgtactcttagatatcttgagagggaaagcattgtttagattttaaaaatgtgatataaaaacaaagtttctctgctaatcagtattttctagctctttctaattttagtaacttatgaatataaagggtttattgtgaaaaattttaacatgttaaaatagttttcagatgaggtaacagaaatataaatgttcatgattagttagcttttcaaattagatagaattgaattgaaaatagcattttaattttaaattttatttctctcatctgcttctagaaaatggcattttaaaaatatataatatttttaaaattatttcacacttctataatgtttctattttctacaatacacacacacatacatactagacatgaattttagtcctaaaatataccttcaaaatcaaatgtagctctgcctcatttcaggaggaagctgtggtatttcatttaatataggctttaaaaaataattttataggcttaaatgtgctcttattgcaggaatcattctctgggcttgtggtataagtcattcagtgaaattagaatgtcaagtgcaaaactgaataccaaaggttgttatttggattgatgaaaaagatctagtaactagtaacaaatggaaaatgcctatttaaaaattgcaaatattttattgttttaaatttttatgtgtgtcaattttataatacaaaaatctcatcaaaattactaatatgaattgaatggagtttattataatcattgcttttaatttgtattataaaaagtttcaagcaggaacaaaagtacacagagtagtgtaacgaggcctcatgtatctactgtccaccttcattgatttcaatgcatgatcattctgttcatgtatatgctcattttgcaaccttactcccaatattattttgatgcaaatttcaacaatatattatttcacttataaatatttctgtgtgaatttctaaaaaagaaaactatttacatgcaagtactatgccattatcacattaaaataattagtaataattctttaatgtcatcaatagctacccaggtttcaaattcccaattgtctcatcaaaattataatattttgaatttacttgtttgtaaatataacctctactctctaacatgtctataattttcacatttttatatgtctttattttagtctctttaatcaataagtttttccataatttttttctctctgtttttgtttcccatgtaacaaataaatgtcatttgtgcagtagagtttcccacagtctggattttaatgatggcatccctgtagtttaacaggttcatcagtttatggaatttcttgtaaaatgttagctagatataaaggtttgatcagaatcatgtctgattttcttttggcaagtctatttcatagtggtaatgtgttctttcattgggagttatatttggcttgtttctttttttcgatattagtaccaactgatgctcaatgactttactgatttttcagggattgaaaatggttgttccaatcttatcattactaacatactaattaacagaatacttctaaaaaacatcaccactgcccatcacctactactggattatctagtgaaataatttatacaggaaagtcaagataattagatgattctttcccttcatttgctgactctcaaaataatgaatttattttctagcattgtttaatgatgagtgatgatctgttgttatgagcttatggatttagacatacttgacatatttcaacctgttgcagtttattattctaatccatggtttgttactcttctcattttaattagtggagtctcctcaactttgaactaagactttgtaccactcttgccctagactgtgaatcagccatttgtccaaggaactttggttttgggggttgtagtttccagtctttcaatagtcagagttcttttttctttaagataaactatgtcttgtatttacacagcttgttctaattcagaatcaggactgcagcagttttacataaccgtttatcttacatttatatctcttttcacgtatattttccagttctcaatagcactgaaggtaatagaattagagtatcactttcatcccatgttgcacacaacagagacatagaataacaattcaaatactacctcatctatatgagtactgagtttaaaatttgtttgcatttctttttgtcttcatgatgtatcttcttaggggtattacagtcaaattattatgttttaacatcacatgaaatagctcctgtctcaatgcttatactaccaattggatatgtatctaggatcgtattttcattttattttctattgtcagaaattgccctttttaatttaattttttacatttaaagtggtttattctgagccaaatatgagtgaccctggattgttacacagtctcaggaagccctaagaacatatgcctctaagtaggtgtttgggatatagcttggttttatatatttgaaggaggcaagttacaggcaaatacataaatcaatacatgtaaggtatacactggttcagtccagaaaggctggacatatcacagtgatggcagggagggtgggctcacaggttgtaagtggattcaaagattttctgacaggcaattggtagaaaaagataacctctgcctaaagagttgaacttagcagaaagagatgcttgagttaagataaggtagataagatcgctagagttaagactctagttgtgaaaatttaggtttttattatgtagatgaagcttccatagagcaggcttcagagagaatagatggtaagcctttcttatcgggaccttaaaaggtgtgagacacttacttctttcctggatcaggaaaagacctggaaagggaaggagattctgtacagaatacagattcccccataagagacagctttgcaggatcatttcagaatgtgtcaaataaatatattttggggtaaaatacctttatttccctcagggccttctacctgttatgtgatgctataccagagtcaggctggaatttggttatcttatacaacagtctcttttgttagttctgtgatctctgttttaatattaaagcttgtcagttgttcttaacctcaaaaatgtaggagtttctttatagcaatgtgagaacagactaatacagaaagttggtactgaagagtggagcattgttataaagatacctgaaaatgtgaaagtaactttggaactgggtcatgggcagaggttagaagagcatgcagggctcagaagaagacagaaagatgagggaaaatttggaacttttgagagacttattaaattgttgtgaccaaaatgctgacagtgatatgaacagtgaagtccaggctgaggaggtctagatggaaatgaagaatttattgggaactggagcaaaggtcacttttgttataggttaggaaagagcttggttgcattttgcctctgccctagggaactgtggaactttgaacttacgagtgatgatttagggtatctggaggatgaaatttctaaggagcaaagtgttcaaaatgtaacctggctacctctactagcctgtgctcatatgaatgagcaaataaatgatgtaaaactggaacttatatttaaaagggaagcagagcttaatgtcttagaagattggcagcctggtcatctgctgtctaagcttggaggcttggaaaatttgcagcctagcccattttctgggaaggaattcaaactggctgcagaaatttccataactaaaatgaaggcaaatgctattagccaagacaatgggaaaaaagctttgaaggcatttcggagacatttgtgcagctcctcccattacaggcatggggacctaggagaactcaatcgtttcatgggccaggcccagggccttgctgccctgcacagacttgggacactgctccctacatctcagctgcttcagctctagccatggctccaaggggcccaagtacagcatgggccactgcttcagagggtgcaagccataagccttggtggtttctacatgatgttaaaccagcaggtatatacagtcttaagagttgaggcttgagagcctctgcctagatttcagaggatatatagaaaagactggatgtacaggcagaagcctcctgcactggtggaaccctcatggagaacctctactagggaaggggaaatgtgtggttgaagcccccacacagaatccccattggggcactgcctagtggagctgtcagaagagggcctctgtcctctagaccctggaatggtagatacaatggcagcttgcatcctgcatctggaaaagctgcaagcactcagtgccagcccttgagagtagccatgggggctgagccctgcaaagccacagggacagagctccccaaggccttgggagcctacccattgcatcagtatgccctagatgtgagatattgagtcaaaggagtttatttcaaagccttaatatttaatgactgccctgctgggtttcagacttgtgtgaggcctgtgtaccctttcttttgatcaatttctccctttcggaatgggggtatttacccaatgcctgtatccccattatatcttggaaggaactaacttgcttttgattttacaggctcctaggcagaagggatttatcttgtcttagatgagattttgaccttggatttttgacttaatactggaatgagttaagactctaaagaactgttgggaaggcgtgattgcattttgcaatgtgagaagaagatgagatttggtaggggccaggggctgaatgatatggttgagatctatgtccctgctcaaatctcataatgaattataatccccaatattgtaggacgggcttggtgggaggtgatttgattatggggtggtgtctcatggtttaacgtaattttcctagtgctgttatcatgatagatttttcacaagagctggttgtttaaaagtgtatggcacctcgttcttctctcttttcctcctgctttggacatgtaaagtgcaggctccctgttggctttcttccatgattatatgttttctgaggcctcccctgaagccaagcagatgctgccatgctttctataaagcctggggaaccatgagccaatttaacctcttttctttataatttaaccagattcaggtgtttctttgtagcaatgtctaatgactacattcagagaatgactaattcagagagaaaagtaatctttgttgttttacccactcttgttagctctaaggactttaaaaaaaagtgtgttttttttttaatttactctggaaaacaaaacaaagaatgaataaagttttaaacaaaagataagcactgcctagctctgatgatgacaggaaaaggatactcacaggcagctaaatatttaaattatttgggactaagtcaaagaacatattatattgttagatagaggaaacatgactaaatgagtatttatggttttgtatacaggcctggtactatatcacatgaaggcagtttattttgactgtcatccgctctcaggtctgaagatgagtctttaacttgaatttggtgtcagataccagtgttgatgtttaagattcagtaggagttgggctgggtgtgctggctgtcacctgtaatcccagccctttgagagaccaaggcaggtggatcacttgagaccaggagtttaagaccaccctggccaacatggcaaaaccctgtctctactaaaatacaaataaatagccaggtgtggtgcatgcctgtagtcccagctccttgggaggctgagttatgagaatctcttgaacccaggaggcagaggttgctgtgagccaagatcttgttggtgcacttcagtctggtcaacagagcaagactctgtctcaaaaaaaaaagattcagtaggagtcagtactccttttcagatgagttaggagttaggtgtgtacctacgggtcaaagccttgcaacttaacagcacaaagtagtttggttaacaatatttgataaagaccctggagctggagagaattttttaaatgatgtttagtctttcggctagagcaggtaggactggaggtttttggttatttttgttgtttttttttttaagagacggagtctcgctctgttgcccaggctggagtgcagtggcgcgatctctgctcattgcaagctccgcctcctgggttcacccgccgttctcctgcctcagcctcccgagtagctgggactacgggcacctgccaccatgcccggctaatttttgtatttttagtagagacggggtttcaccgtgttagccaagatggtctcgatctcctgacctcatgatccacctgcctcggcctcccaaagtgctgggatttcagtggagttttttccttaagtggaagctgtaaaaaaattttacaaccttacagtggttaatttttataattttaataagcccctagcaatagctctaagtcagacacttaatttagtgttcgattttgaagatgtttgtcaaagatgttaaaagcctcaaaacatttgattaaaacagagtcataggtcattgtaaaataacagttattcatttatccagtgtgataataaaaagagctcaaaagtgatgtaaaaagttacatggatgtaaaaacttatctctcaaaatttagttttcttaaggcaattttaaaaaccgaataaaaacaacaggaattgttgcaaaatctttgtttcttaagctagttatcaaaaaggtaaggaagagcctgcagtgtgatagtttttgcttatgggaagctccttcggataaccagaaagttaaacttgatgaaaagagaatgtgagttaatcagacataggaagaccagtactatgtcatagagcccttaagcaagagaatatgtgactcttagcgacaacatgggaagttgcctggttataatgaacactttaaacatatgtttgggctcagaaaacaataccccacaatggaagcctcagaaacaacttcaaaaataaaagtttttggccttctgcccttctgtcactcagctccattttcccttgaggctgcccatagaaactagaacctcttttcctccatgtggatcctagaaaccaaaactccttttcctcaaagccagcaatacaaactaaaaatattaccctaatttttccttcacctttctgtgtgagaaccagccataaagaaatgctctgatcttccttgttggactgtagattataagactcccatacccagaaagaaggaagtgcttactcaaggagattaagaatctatacagacagacaggccttgctggcttttcccacacagtctactagcattaaagtataccctttttaatatcatattttcacgtctttccatactttattgacagtataaaattgacaatttaccctgtatctttggtctttcttctgtaaactcccccatatatacaccaaacaaatctgcataccttcccttcaaccagtctgtcttttttgagctttttcgttgatttttcagcaaaccttcagagggcctctggctgctaaacatattaagaaaagccaggagtacagaattaagttatactggaggaaaaccgtgtctttttaaaaccttcaaaataaaacattttagcatcaggctataacaacagatgtagaactggaggaaaaaaaaagtgttacaggagccaacaaaagttgaagcttcaatgaatgggtgtgtgaaagaaaaaaaaatgttgaagaagagagttagcatctcaggtcttctcaaagggtggacagttgaaagcagcagggtatagaaactgaacttttaaaatatcaatctgagaaacttaaaagaaacagattatatagaattaaaaatttaaaacttacaatttcacgaagagtaattgtaaaagtaaagaaatcttgttatactaaccaattatttagttatgtattagcatattttaatgtaaaagcttaatctctaggaagactaagtctcttaattatagcaaacttaaccacgtagaaaatatcttttattaattctgtttttatgaatcttatcacgacttacaaaaaccatttacaacatgctcatactttctattttgttgtagatatccatctgccttaactaaccagtcatttatgttaggacagaaatttattatacaaaattattctgtttttaagctttcttgtcagaaatacctcttaatatctgtagtttcttcacaactttctctcttacttactggtttctttttcatttgtttcataaataatattgaaatgaactttgaattagataaaaattattttccttttaaaaagaacacattttcatgtctgtcataatttttttaatccaaaccacatcttattttggcatacttgatatacagaattatataggaactagaatttttatacttagtaaccttacatttttgtgaaaacctaggaagtagaaatcttgaattgtctgtcacttcagcattttatagataagaaccattttataaattttttaagaaaaaatatcttcgtatgtattttttaaaattggaaattatacaggcatttaatgagtatatatcatttaatttactacaatttaagattttaaattacatgacaagctcatttataagcatttatcctgaaacatttacctaattaatttatttttaatagtttacctagattacttatgaaaaactgagatattagaaaaagctagaaattatttaaagttatttttctgttaatcattttttttttagtctgtgactatcgggtatttatctaagtaagaaccttaaggttaaatatatggtttttaaattgttttgccaataactcaggattttactgttttcattaaaccgacaacactgaatatcttttttatcaaaaattacacaaatataattctgttttgcattaggtttatagttttataaccttcatgtcaaaactggacacctcataatatctagcagagataaatataaaactgcttaatcaataaattcagaaaaaaatgtatattgatgattctgaagacattttaaaatttattttaatagtaatttaaaactcagcttatttatttaatatttacttaaatcacataaacttgaaaaatattttggcttatttatgtaatttttgagtactctattttcaagccaatttggtacctcgtggccaaaacacgttacaaaatacatgtccctacacataaacatatctaaacacacatacacacaaacacaaagatcatattgcttttacttcagaactctggctatgagatagtaatatgaacttaccagcttacaaaagaaaaaaatgtaaaagattgggtccaaagaatgggttttatcttgacaccagtagaaaagtaatggcagatttaaagcaggcagaaaaagaaaacagagaaacagataacttagctttgaagactctatattttaaaatgtgtacactagaagaccataaccagatgaagtactaaaaaccccagcatgcccttgaactttcccatttacgcaaatacttggaagcagaggtgccataaaactgactgggttgctccaaagggggtcattctctttgtctttcttcatttgtaaatgatttgtttatatatatatttttctttaagggaggaactgaactgtagtctagatttcagtgtagtggaactgagaagctcagtctgtcatttgtttatgcaacggacagtccggtttctcgagcaaatgcaaagatgagctaattgaaattgattatgagagaaaaaggcaatggagaagatcctttagaatgaacatctgaatcaaaattaggatcctgaaaacttcccaggaaaagaacaagctcagactaaaccaaaggactgtcaaccaagtgggagatccagggctcaggacgactaacagttctatcagagaagaatctctcagtcgaggggctttcaatgggcacatcttggtatcttagttctgagttcaggtaattcctttagcaggtcctgagttttctctgaggctgcctatgggtgccaattaatgctgatgaaagaaaccaaactctgtcaaatattcaaagaggttttttctgagcccaatatgcatgaccatggcttgtaacacagcctcaggaagtcctgagaacatgttctccttgatttaattttgctttataatttagcaaaaatttacatttttccacagttcaatttacaaaacaatttaaagaagagtggcctcaatccttgtcctctctaccttataccttttttttttcattataggtaaacaatggggtctgagagttagggcataatattccccccacttttttttaactggaaatttctagtgaagatactagccttatgtcattgtttttttcaggtagtttggattcctgaaggtgatagtataagaagagctgactgaataatatttccttagtgtcgcatgcagaaaacagttgatctgcaccttcatatttcagagttacttgtgtgctccaaaatcaccttttatttttattccttcagttgtcttctaccataaatcatttgctgtcaatgatgtcaaaactttgattacagtctatttttctttctcctttataaaaaatgccttggagttctttccctacattcccaaagtttctttttcttttttttttaattttaaaattttgctagaatttgagtagaatatgtctccttcttggttattatggtgactttgcccaagtttacaacatactcttgatatgtacatgtttttgaatttaaagtatttttttaatttttaattttagtatccattctgcctcttgttttggtttacttctttgaggagtcttatatgttggatttttttttctgccttccatatttgtgacatccttttgaatcatttttcttctttttttatttgaacattttcttatgtttatatttttgttttttttatagtgctacccattttgttgcattctttctggttcatttttccttttagacattacttactttccttatttttaaatttcctgagttctatcacccaatttctgagtttttctaatttttattcatattgttttttcatatcttctattttcttaattgcttttagctcattttgaaaaattaggctagagttttaatctgatttgttgacaatttttgtatgctttcattgcttgtagggatgttattttctcctccttttcttttataatcttatcacaactttacataagatgtgagcacaatgttttgttcatttttaatttttgtcatgagattagactttctaagattttaaacaaaggtagtggcttacaatatcttttctatatttataattttgtaactctcaattctggtggttttaatagatagaagtatagcttcatactttcagatttatcctggccttgtcttctccccagtgtttttctggactttttctttaatcactcttattccagtttgtctcagttggtttttatttccaaaatttacctttaatataagacttagtcctgaaaggtagcttttgggaattcatatgactcagattgttccaactctttttgatctgaacacaaacacaaacctttgcccttgccagtgagttggcttagaaaatgccctttcaattactgctgatctcattgacaacctgttgcctattttggtatgttaaacgggcttttggtatcctttattttctccaacactgatgccgctaccatgagtgtcttctgactattaatggcttactctcactcaattccattataagaatctttgagatagcttgtgcattaatttcctatgtcttataacaaattctatgccacatgatacacttggctgcttaaaattacagccatttattacttcacattttttgtgtgtcagaagtcccatagacttaccatacctgtgtccttggcgtagggtatcaccaggctgaaataaaggagttttctgggctgtattctcatctgtggactctactagagaagaatctgcttcagagatccctcaggttgtcggaattcatttccttgcatgcagctgcacaatttatggcaggatgcttcttcaaagctgttaaaggagagacaaaggctgtactttttgtagtctctaatgttaggcaaagactgggatctctccataggcagttcttaacatggctctttccttctacaaggccagaagaatctcttttctttaaaaaggcccagtccctcttttaatgaatctcacttgattaagccaggtctacgcatgttaatttctcttttaattaactcaaaatcaactgttttgagaccttaattatatctacaaaacctctccatctttaccatgtaacttaaggtaatcctggctttgatattccattatatgcataggtccttcccaccctcaaggggagagattgtacagggtgtgtacaccaggtgggcaaggatcttggggtccattttaaaatccaaccatcacagcttgccacctatttttgttgtagattttgttcctgtttttgtttgtttgtttgttttgctattctggttgtattatcttttattatggaggaattcacaaactagccatcatgattacctttccctaaaatcctttaattaaagttttgtatattaacacaatttaataggaagtaatacaatagtaacaaaagacactacagcatcataggtatgatattccgatatcaaagtataggtcctcagtctctcatcattttgatttaaaattactttcctcactgatttagctgatcctcccaagttctcattatagaaacatgttcatgtctccattatagcaattagtacattttattatctatattctttgacccttgatttctaaactggcaaacatggatccctacaggaaattcaaggaaaaaagagacattaaaatttgtattaaaagttattttttattttttaacttttgacttatattttcagctatatttcataatatgtgcactaatttaacaggtagtttatacatatagttttaaattgagtataatatgtgttctgtaagaatatattaatttgtacatattttggggcacatgctcaaacatttttcacatacagtgttcatgaagaaaacattttggaaaccactttttagatagtgaactattttaataggtgctgtatatctctatttctatccatagatcttttgcacttggcacatacataaaaacaataaaatgcagctgttctgcaataaactaacataatgttatcacttacctggaccacagcattatccactatagttctatcttcttttattagctttaccatatcagttctggtaggacaacttttctaatatgtccttgtttttagtatgtgaaaactatcaaattatgtttttcatattatatgctaatatctgtttactgataggatgaatatcttgcagaaatgtccctgaatctttcatagaaatgttaacacttatgctttccaggttacattttgtgtccaaggaatgaagagtattaaaatctaaattttttcattgtgtttgcaaatgctctttcaggctctttaaaattcagagcccaaacgatctaattggcagttgtacatatcaagctgaagttagaattgattatacattgcgatcatctgtttgttctatttagaggtgaaaaagcatttcttttcccactttggcttcagtatttgtttggcaatcaaagtacttggacttgtaagttacatcagtgtaaaatacttttttaaaaatgagatttttaaaaaatgtattctttaaaataatgtttagtagttctgagttcaaagaaaagacattcaacccagcaaccccattactgagtatacatccaaagtaatagaaatcattctaccataaagacacgtacatgtgaatgttcattgcagtgctattcacaatagcaaagacatggactcaccctaaatgcccatcagtgacagattgtataaggaaaatgtggtacatatacagcatggaatactatacagccataaaaaggaagatcatgtcttttgggggaatatggatggagctggaggctgttacccttagcaagctaacttaggaacagaaaaccaaataccgcatattctcacttataagtagaagcagaatgatgagaactcatgacacgaagaggggaacaacagacaccagggttacttgagggtagagagtgggaagagggagaggatcagaaaaaatacctgttaggtacctggcttagtgcctcggtgatgaaataatctgtaaaacagagctctgtgacatgagtttaccagtataacaaacccacacgtgcaccctgaacctaaattaaaagtttaaaaacattaaaaaataaatacataaaaaatacaaacgcagtgatgggagttctaatatatacttctattgtggtttgagaaaccaagactaaggttaatataaaatcttatccaggacaaacagaattaaaaagcagctgtgcaaatgcatttcagcccccaacttgcacttgcatttcatcttccaacatcttattggccaatgcagtcgcatgcccaatttcaaagcttgccctcatgaagtcacatcaagagtgtgatatatacatatatagatatagatatatcacatgtatagcatatattatgtatgatacattatataattattttaataattatgtcaaatacataatatatgactaccaaattattaatagttatataatcagtatattaacataacaattattaatataattattctattaatagtctaataattacagtaaaaatctataataattttgtttttttctgtcatttcttacttcctattacattgttactggttaattgcattattcccaattctttgttctcctgctatatatgttatatatgtctgccacatagaatatatatatcacaaaaaaaatgtaaagaaggcacaaaataaacttgcatgaaaaaatccaaacacatcagtagtcaaaaggaaataaagtagttaaaacacatgttttcagactgaaataaatataaatctatatgctgcttagagaactatattagtttacacaatgcttaatattattgatttgtatgttttcatgtctgtaacaataaactgtgttgcataatataaaagagaaatgccttcacttatatactatatatgttccagaaatgtataaatatctagttgcatttaaaagttttggaaccaatcctttcttaaaaaagaactctctatgaattgtttgttaaattaggaatattattaatttatcattttaaattgtactcttctccggaaaccatatttaattctttttcttatttccaggagagcatatttctaccaactattgttattcaataaatgtttagaagtcttggttagctgataatctcaacattccagagaaaagtaaattcagagaaagtaagagctgttggagttggaaagggatggatttcataaagattaaaatttaaaacatcaattttacaaatgaagaaaccttaaagaacatttttcattttgtatggcattttaatcatcataattttctaaattcctgtctggttgcaaattagaaccattaaattaaagttagaagaaaaaaaattctaccaaaatacataagcagacaaagacgtatatatgtataagaatgtcatttacagcattctttctgtatctccaatacctgaatatctattgtttggttaaataaattataatgtatccacacaatggaatggtaattggcctttaaaaatgtgagatgtgagaaaaagactatgcatgtgtgtacacatatacacacatgctactggtgtgtgtgtgtatgcgtatttgtttgtgtgttctgtaatgttatacaccaaattgctatcagtggtaaggacatgactctggtggtaggaggtaactgggagatgtggtgaggggaatactaattagactgtggggaggacgccttaattttatctttctatatctctctttttctcaaaatttgcaatatgcttttcatcatgaaaaaaatcaaaatgggaagtaaaatatcagagacagcctacactgatcattttttatgagtaaggtgatgcaggaaaagcattaattaaatgaaactgccttacatcaagtagtaccagacaatagaaaagggaaatcatttaaaccttattcgtttatgcatatcctatatttttccaaaatagagtaccaccaaaacatctaaataattcaaaagtgaggaaataacagagaggagatacattttttgaaaagtaaaactaaaaagagctggtttattacaaaatgcatatactggagatctatcacatttgctaaaattgggccacaaatgtggttctaatatttctaacagccagaccagataaagaaacatgattcacagtgttcattagataaaaacaaatctattgttgggaagctgtagcagtcattttgcatcagcctgagggcagagaggataactgttaaagcttctttcacatgtcattcaaatgctaaacttaactgtagaaaggtcccaatataaaattacaataaaagccaggttgtctaaaacatacctattttaaaagttaccaatggggaatacctcaatcttcaaggttacacggggcattaattaatttcggaaagggtcacactcatgcaaaagtttgttttgatattgtagtatttcaactttgaaataactcctgtcttcaatatactgcttacattgtttatgtgttatggctacaaatttttattaactgtagttttcactagccatttcatgttattattttttgagacagagtcttgctttgtcacccaggctggagtgcagtggcactatctcggctcactgcaaccttcgcctcctgggttcaagcatttctctcgcctcagcctcctgagcagtcatactatttttgcaataaatagagggtacctaaaacatccaaaccaagttgtttgttatcaacttgaaagtggaaccataatatacttaattcctcaatactttactatgtggaatatttttggtagaaaaaaagataagattccacttgtatattgggaaattttatttctgtcaatatcaagatgatggaataaatcttattagtcagtcttcagatgtatgttgggcctttattctcagctcagaatgctgctaggaattgtaggaggagaagaggggcaaaggagatgtaagaagtggtccctatcctagtttggtttgcatattagagggcaaaggctttgggatagcattctaagctctgccgggccaggtagatagcactgtccaatttgtggtggataaacatcacaagtcagtgtttggagatgaatataatatacctaacatctatatagtgctttaatatttacaaaatactcgcccttatgtttgatcctctccgaatccatctgcttagaggaaaccacaagtttcctcttattttcaaatctcccagcacatataagtggaaactatatatctggctttctatacaccctttacatgctgttcagtgaatcatgttgacaaaataaatgtttattatgatctgtagagtttaggaagctgaggctgaggagggttgatatttaacctaaaccactcactgcattttggagctgagatttaaactgagctttgccctcctctaaatccagcagtgttcctgcttgtattccacagtgctaggactcttatcaaccttgctgctgctcagacttgagccttcttacttggcttctgggaacctttgtaaggggtgtttgcattcaggctcaaatgcctagccacagtgaatcttccagagagatatgtaaaagagggagcctgaacatcttcctatcttcataaaattaagattgagcaataagatggagaaaagagaggcctgatgcttttcagtctaccttgagcccaggcccagggaggtccaccactgagcctcccacctgctgtggtttggttaaatgagccagtataaactccttttcttgcatgtgctagaattgattttcctttatttggatctgatagagccctgactgatagagctttatgagttaaataatgcaacagatctaaaatggcttctgtttactgtacaagcaaacattttgagttagactttgcgttgatgtgttgacagtttaagacctttggttttcaaaaacataaaaaatagcctttaaaaaatggctgaaaaatatcaaatgtcagtgaatagaaatgtacttttgtttttagagtaccagtaaaattattcttctaacaataattacagaggttaaattatttgtgtgaaaagtaaaataatggacacatttgaaattaaaacaattgttggtgacattttaaatttataataaaggtcaaaataaattttcttccatttgatgtttttgaataatatatggagacttagtgtgcaaatacaattttctgcccgtaaggtaatgtggttgttatttttgttgttattttggtctgatgacttttagtcacgccagtaaatgtagttagggcacatgaatcttcaggtcgtatacaaagtcattaacattaatagccacattctgagcagtttacaaaatgaagagagggaatttaataaagtcattataatggataaccaatttgctctgtgaataaaaaggcatttagatgttatatttataaaaataaaacaaaaacactttctaagccacttttgaaaaatatgtaaattacctagaagtactttttttgtttgttttaattttggctcctaggtaagtactgagatgcttttgggaaaataggatacactagagagtctgggtccaaatctcacactttctacttaaatgattgtagacaaatttatccaactctgtttcctcatctgtaaaattgggttataaaattcatggaatggtgcttggcttatagtaaaaactaatagctgttaatatcttatgatatgacacagctgaatcaagtagtttttatgtgctttgctaattaaataatggcgctataaaattcatgactttgaattttatccaaaagatcagattctgtcccttctctcagcttccccatcatagctttccctgtctgaaaaacagcctgtctatcagctttgtaccagagaggagttatcaaggaaacaaaatatacaggtgcataaacagtcttaggagactgaaaattcaggtgccttatgaagaagaaaacagcggcaacaacaaaaatcccttaactgttcatagttttaaatattaaaactattcatgtttgaacccctgttggatttgtataatggtcttggggagaagatgcaccagagaaatgtaagaattagcaagtatccagagagatatggtacacttagctaaagcgggctgtgggggtgggggttggcggggggttcaccctttcctgacttaacttgctagaacagtggttagccaaatgccttaaaattggacatgtgcttctagtttcacataagccttgctgcccctattatgttgtagctggcacgatttacatgtttattttacctcctgattcgtgaagccctctgaatgttcaaagtctgatctaaagccacatctatcacattgtagacattaaataggactccctatggtatttaaatcaacattcaacacaatggctaccatttcaccataagaaaaaaaagagtttaatgattgaccctcgagcctaagcagtcaagcaaatataaagttaaaatggagtttcactcatctagaacagtattttatcagtttatattatgagaaatttagattacaaacctgtatacagttctataaaatgcatgttttgctaaaaactgattttataaatagcttaaactgaaaaaatgaatttcttttcttttttttttttttgagacagagtcttgctctgtcgcccaggctggagtgcaatggcacgatctcggctcactgccacctccgcctcccgggttcaagcaattctcctgcctcaacctcctgagtagctgggattacaggtgcctgcaaaaaaaatgaatttctaattctaattataatttagggtggaatttaaatatttcaattaagagtagtaattctcatcatatttgtttttcttcagaaagggaaagtcaattgcctttttttttccattccaaaaataaactattggaaagatttttgaaaatccactgtggcatcctattttctttcctagtactcatggccagttcctagcgtcttcttctctacagttttacttgtattacctgcatcccagactattacatacacccttagctgatcttcctgccttgtaaactttccttattcaaatttgctgttctccaaggatacaaaattttctttaaataggaggaataagttcaagagatttgttgcataatatgatgactgtagttaataacatattgtattcttgaaaaatgtggatgtaaagtgttctcaccacaaaaatgataaccatgtgagataattcatatgttaagtagctggatttagtgatctcataatataaatgttgaaaacatcatggtgcacatgataaatatgtacaatttcatctgtcaatttaactattaaaaaaacaaattatacgacactggtctttgcttccaggttaatattgagaaaacacattttccttgatcaatatctaatattatctctcaaagtattttttctacctgcaatttaattggaaaatatgactccttcataagccagagtgatttctgctttcctgaactttgggtcactcctttctctcacagccacttggcagttatccatgcccacattgtatcatagtaatttccgatattctgtgtgcattccggtcctcagcatataactgggctggtgtgatggaaaatgccaagttcagtactttgtagattataagcagtcagtacattttatattgaaattctgatattgtgcatttcaggtcagcaaattctctccatgttgtctgtgaagctttagacagagtttactaaaaatatcctatactttcacctaaacactggcagtgacatggttttaccaaatgtatctttttagaatcttgtgtaataaatagtagattttgaatgataatatgagaatatgaagaaattttaaagcagactcaactgattgtcacctattatttaatgttaatatcctaattttctgccaaatttataataaaatgtaacattctaatttcaaagaggaacgaaaaggttcctagtttatgcagagactgaattttcagtatctccatattcttagttaatgcatcccagactctccgatgtttcttgctgtgatgggtgcataaaccttgacgtttgatgccattcagccttatctcaattctaggtttcttcctcagcttgctaactctgtcttgcaatctatctaggtccctagataaatgaaaattatagtagaaacaaatgaggaattgtttaaaggaaaaaaaaacaaaaacactgaaagcaggaaagatacagagcatgcatttgattggaagagagattcagagacagcaatggcaggagacccaaatggcttatgagtgactaaagcaaggactgtctatctactctattccaaaaatgagcatatactaagtgctctagcaatcaatagctttgataaaaataaatatttttgaaatacatagggttaacaatggaaaaggcatgtttgagacctcatcatgtctcttatatctatttttatttcctaccactccccacagactcttctccaggtctgtcatgataccagatgagcacagtacttcatagattataagcagtcaataaattatgagtagtgtccacaactagtttttagtggaagtcagagatttttgggacatttagaacagtgttgttgggcagtgaaaaggatcttttaaaatcttattcatgttctattattctgctattttctttccattccagatcattattaatcctaggagttgaagcaggttttctaatctctggatgcattttatagatggttggggaaaggtagtaaaccaaacatgaacatgtcaggtaattttaggatttaacttcagcctctgttgcagggactgatcatttaaggtctgtaaactcgtttatgatcacagatttacatatggtagacactattagctgcccattcttcagccattcctctagcctttcttgtcaatgagtccaccatctcctagaaaggctaaaatgacccatattcatttccctactttttgagggagatatcatctcatcaggagaccaatttttgcttgggagcatctagaaagtcttttttcatgcaataaaatgagatattcttctacctgcatttatatatgattacctaaatagagacagccaacttgtgactgtgaaacaacaacctaaacacaagagtaatcatgtggaggatgggacaactgaattgaaaacactagtgtcctggataatagctattttctgggatatttaccaaccctggaaccattgactttctgatttcttataaaatgagataataagaccctattatgcaaaccgcttttggtcagcctgttacttgcatctccaaagtatccttacaaagacaaatggaatccaagtttggctactcttaggtggcggcataaaattgttcatagggcacaattctaacttcttagactctgagttcaactttgctttttgggtttttgtatttggattctgctattctgactggatttaggttactggattatctgtctctgccacaaatgacttgtctggtttaaatttcttcagtgccagtgcttgttacatacactaggatcctttcactttttgacatgtttatcaagcaggactttaaaacagtaaatattaatttatatacaaagaaaatcagtgtttgaacttatatggatgaagtatgctttgacttaatgatgtagtggtatttcttgctagacatttgacatattttggaataaaagttgctctggtcactttcattgagtgatattttggaagtgtcaacaaaaagagtcaaactctgtaaaatatttgaagagatttattctgagccaaatatgagtgaccatggcccatgacacagccctcaggagaccctgagaacatctgttcaaggtggtcagggcatagcctcgttttatgcatttagggagacacgagacatcaatcaaatacattggttgtcccaccagaaaggtgagacaacttgcttccaggttataggtagaattaaaaattttcatattggcaattggttgaaagagttattatcaatagaaaggaaaaggaatgtctgggttactataaagagttgtggagaccagagttttatgatgcagatgaagcctccatgtaacaggcttcagaaaacataaattgtaaatgtttcttattagacttaaagagtcatttctatcagcagttctgaaagggaggagggtataatgaggcatgtccatcttccagcccccatgatggcatgaaccagtttttctggttaaatttggattgccctggccgagaggaagaatctgttcagatggttggggggccttataagtttttttattttgttttgtttttgtttacagaaggcattgcttcatgataatgaatctgagatgggagtcagcctggtatagtggaatgttcaaactctaatatccattagagtcacaccagcttacagtaacattctgatcccactacttgattgacacataaatttggccaaatcatcttgctgcattaatccagatgcaatcatgttgaattgctaccattctgaaaatattattttgagaaataaatgagatgctacatagaaagtactggtgcattgctagacacatgctaggtgccaaatagatagtatatcaactcttcagcactctctgcaaatgagattgaaatgaggaatttcagctactctgtgaacctgctggttttattttattccatactcacaacctgcatgatgctgtaaatgtgtcttgttttcttattgatcactgtacgttttttgagagaaagaattcaaactcattcttttcaggacaaagcataaataaagtatcagtaattgatacttctgtgggaatatagagatcattctggtcaaagcaaaaatcagacacatagactgaagacataatttgaaacatcagaacccatagtctgtgccaggtccaaacaaaggtggtaaaatcagagatatagtttggattctgaaatagtggaatgtatggaagtttgatcacttgtggtggtaaaatcgcaaattagaagcatttcagaatgtttgacaaagtttacatagataatagacaacaagtgtaaaagcagagttgttaataatatctagttttaggaaatatttgtgtaattctttgtcctacactgttataatcaatcaggatctgtattatttctttttttgctattccaacttttgttctcccatattatcccagaaataattttcccatgtcactgaaaagaataaatcaatttaaaaacagtaaaaatagtaaaataaatattttacttaacaaaattatcttcctttggaaaacacgtgatgagaattgaatttttatggcatttttaatatagcactaaaatttcctgaacttgccattagaagagctggagtcagatatttagtgtcttaccaattgtatgatcttggaaatatttagaacttacattggacctatgtatcatcatctataaaataaaggttgttttacctgcttcagagaatgactgtattaaatagaacatatgtgatatggtttgagtatttgttctgcccagatctcatgttgaaaggtaatccccaattttggaggtgaggcctgagttctcatgagatatgggaggtgtttgggtcatgtgggtagattcttcaaggtttgtggctgtcctaatgatagtaaatgagttctcatgagatgtggttgtttaaagtaggtggcaacacccctcccctttttcctccttctctggccatgcaacatgcctgctcctgttttgccttctgccatgaataaaagctccctgaggtctccctggaagctgagcagatgccagtgccatgcttggacagcctgcagaaccatcagccaataaaacctattttctttattaagtacccagtttcagatgttcctttatagcaacacaaaaacagccaaacacagaaaatatgtgaaagtgcctagatgttcagatcttggcacagaataggcacataatagatattcgctgaacctaaatgtgttattcttaaatttggtatttgtcttttccaaccccatttttcccacccttgcagaaaatcagaatgtttatctttcaaaaatatgttagtcctatagtaattctattttcatttatcttatcaagtactaaagctaacctcaggcgtaggtaatgtgtttcagtgggttctgttttactattttttcttgtttcgtcttccacacaacttttctttgtattcccctcctcccccaattgagtctctatgatttgcagctttggcctgcaaccccaatacatctatttattttgctcactaaggatattgtgtagaatgaatactaattaggtagtgaatatacttctggggatagcattatggaactcggtttataacagtatcaggatacagatggcatgagcattgtgagatatcattacttccatgggtagtatagagtatggagtacaatgatgaagctaaaaattaaaataggcatttctactgtacgcttttcaaatgagaatacatttctgctaatgggaaagattgtaaagaattcccattgctactctgggattcagcatcttggaatcatgcctggaaataatgcattgaaaagattgtatgagattatggccaaagtgaattgttgccacattattggcaaattcagtgagaaattggttttccttgaagtttaaaggaggtaggttttagcaatagttcaaatggctttatagagtttattcattttttacttcatttggatatttagaaaactgttcttggctctgattttctttcttcctcttttcttctctttcagtagtacacatttagatttcagcttatttattctaaatctaaccaaatgcttcatacctatggtttacatatcaatacatgcaaattgatggttatctaagataatattaataatgtacatgatatgaagaaattgccaaaaatgtttgttatgtgatcatcaccaacaccattaagaaagatactttagtgatcttgtgctatatttctggcactgtgccaggtcatttaggctttacagaacatgatgaaaataattattttactgatgagaaagtagggactttcaagtttacatttgtttgttgtctaattactatttttatcataatatttatgtatgtaatcactctaggtttataataaataacagttaagtgtgtataatacagttaaattatattagaatattgtaagcattctttttaaaccatttcttgccaatatatgaaataggggaataatagttacctggagtaattagatgtaggaaactagcttagtgtgcacatttttaagtgacttcttcagtattaaaaaagtagtgtttttctaatcactatatagatatatacattatttatattcatctgggtatatacaattatatatttttccctgaatgctaaagtgggtgcactcagtgggccacgatgaattattatcactttctttgactctctttcatttagaatgttttatacaatattaaaaaaagaatattaggacatgacatttctttttgagacaaagatgtttcccgtttattaagtgcatttgtacttaataaactttccaaaagaattgctcttctatagttcagtttgggacccacagaagcaagagtaggattactccatgtttcaggagcctcaactttactattcaacaaggattgcaattcgagcaccatctgcttcacagctgagaatcattaagcttcagcaacatttccccatctcagcacctgacttctgccaagcaagtaggaagttttgccttcaccttcacctttcagcaaattactcaattagtaaatgggtatatgctaccatttaaactccaaaatgtagtgactctttttagctgaaaacaaaccaccattggtatctaaattaacattgtattttgctgatgatttctaaacttgaattgtttttaaatgctacttttctacttaatttttcctaacaatttatgatgtaaaacacatggtacattcgggaggaaagcatgttgtttcactttacctgaccaatgttggcatgatcaaagacattcacaaatgttcacttttgttggattgctgagtgagcatatttgtgtgatgttaaaggaatgagcttgggctgtatgttgccacatatggtttgcattatgataaatgaatgttaataggaaaaaaaaagtaaagcattggaaacatgagaaaactccagatttatttctctttaaaagaaagtttttattttacatctaccaagacaggacatctttgtaacagggcatatactacatttttatcattaagtaattattatctgctgcttattctattaaatgagttaagtgaatattttccagcactcaaaatgtgtttacattttatggatagtctcataattttaaaactgattattttaatttaggctttttggttttctcaatattaatgtcaaaattgaaaatacaatgtttttaaagtgtgctttgcctgcactttgtaaactatgtaactggaaattctcttatctctctttatagtttattcttctctttgatatccctgccagattatactaggaaaataaaaaagaatacattttaaattgcactaatgtaattcatatacattgaagcagttggtttttatgtatgtgagaaatatatctgtcattaatatatagtaagttaaagttttattttaaaggcaaatatggacctcaattagtgatagtaaatatgttttaaataggacatttctccagtggaagaagtaagctttgaaacataaagatgtgcagaattaggatgaattgttttataactgagatttttataattttggatcactagaaaagtaagtatatgcactacagcatttaatattttctaatatgcagacttagctttctaaattgaaaaaggcaggaaccaaccagtcttgttattcccggacttgtgccttttctgtctagttgtcactaaatctgaagattaggctttgtgactcctcttttaatgtgttaagaataatgaaaggaaagaaagcaccagatccaaaggccagtgtttatttccatagatgaatcagagaactagaaaaacctggaggtttttcacctccaggtcaccagcctgaaagcagagcaggcctactgggattctgcctgacaacaattttaggatataaaaatgcaaaataaagagatagatcacatagttcaagtctcctttttagatgccaagaattacaaagagactgtgtttttccccacatatttatgaacttttcaaacccatcttatttaagaatattttttcattttatcttctgcaattctcacttctcaagaatttatagaactttattcctgtattttctattataagcataataaatacactgttaatatgtgtttcaaaacaacaaatggtaggtcccttgccctgcctcaactgctgatactgtgacatgtgctcctacctacttgggaagcactagtccaaagcaatccacagtgtcattttggggtactacatgacaaggatcgagtttcccaccttgtctgtttctcccacagtctctaacagaattcttgtttctagaggtagaatttgaatattttattaatacaataatagggtatatttcaaaagtagtaaatcatattaaaactattagcacttacaacattaagtagtaaataacacagcagaaatatcaaatacacttttttggaggattgtatgtaaaacagtcaacttaaattcctatttctaacaaaaggtatatttgccctttttttttttaaggtggggtctcactatgttgcccaggctggtctccaactcctgggctcaagtgatccttgcatctcagcctcccaaagtgctaggattacaggtgtgagccactatgcccttctttttaatatggaattactcacttttgtcttttatgtatttatctaccacaaatatctgtttatgtgttaaaataagccaatttacaaaatgttaatttacaattcttctaattttatgtgttaatatagatatacaaaacaccattaaaatggagaggaatttcagagtattgatctatttagaaatgtaaatgtttaaaatgtaatgttattagtgttctgtaaaagtgttttatcctaaagtatttattattctagatcttttgccccctttaggccttcatggaaacgtttacatgattgtcttcatagtaactcattatatgtgccctcttgtaggacctgggcttgatatagattggtgggtgtgactcagcacccctatcaagattttggaaactaagccagagttaagcaacagcataaacatttatcacaaatatcggagtacatggggactctgagttttcccttggcttttcattgagtaaaggctaaataataacagttattgacatattccaagatacagagagcaatggccaatatgtagttcgaattattatctttttctctgcataacttgctcaaaagaaaggattgcccttactcaacctcactgcacttcattttgtgtgtagtacaagggtaagggtggggaataattccactaagtaaaacaaagaccagaaatacgaaaagggacaagtcaaggtttccagcaggaaaagatattctaggttacatgtgtgaattttgctagttctgtagatgctaatgcttcaggtgcttttggcctttctttctttccactgcactcttggctccccagcctggacctggtcactccatctggtaatgatgcagggtttttctcagccactttgccacctggggacccgtatggctggcaaggcccccctgctgcctgagccttgctcaggcccaggcctgccgctggaggtaccctgcccactcagcctgcctgtgttatagcttgtacccctgtttggctgctcccaagctcttgtcctatgtccaagaagactaaggatatgctgacaatttcaacggtgaggatggcagagaataattttattgagtgatgggactgctctcagcagagaggggatgtgggagtgttcccccaatcctgcagtctggtggtttctcccccagtatggcttagtctggggtttttataggcacagaatggggagggcatgatgattagtttgtgagtatgcaaaaaggttaaaacaaaggcaccactcaaaggtgggcatgacacagtaaaaaactaattagggaaggataggtatatgtaaaataggtgaacagtggggatcaatcagaggaaagcatgccagacaggaagacaggttctcaatctggtccaaggatttacccaggacagcctttgacttgaaggtggggtttcaccagggaaccacctctatctgcctaggcatttgtctgcctcctgcctctgtcagtagatcaggatcaaaagggtctaattcaaattggataagaggacttactggtgaaaaggatgaggaaatccaaaactgaagactgctggtacaaatgaataaagaggatcagtaattttagtcactgaccttagttgtgacgaaatccacattaggcatagggacactaaagtgtatctttctcttctacctcttatctatgtcagaagaaactttaagaaaaccttcggctgggcatggagtttcatgcctataattgcagcgctttgggaggcggacatgggagggattacttaaagctgagttccaatccggcctgggaaacatagtgagacccccatctgtacaaaaataaaaataaaaacaaaattaaccaggtatgagggtatgctcctgtagtcccagctactcaggagggtaagccagttggatcacttaagcctaggagtttgaggttgcagtgagttatgatcatgccactgtactccagccttggagacagagtgagatcctgtcttcaaaaataaaataaaataaaataaaatgttcttagatataaatatattcacatgacagacaaaatgtattagtatacctaggtgcatatttcccctttggtcattaatttgtgaacaagtttcaaccctatgataatttaaaaatattcccaaaacagtaaattgtaagtgaatattcatgttgagtacatgatgtggtgtggctgtgtccccacccaaatctcatcttgagttgtaactcccacaattcccatgtgtcatgggaattatgggggcaggactttcctgagctgttctcatgatagtgaatgaaactggagatctgatgggtttaaaaatgggagtttccctgaacaagctctgtttgcctgctgccatccacacaggatgtgacttgttcctccttgccttctgccatgattttgaggcctccccagccatgtggaactgtgagtccagttaaacctctttcttttgtaaattgcccaatttcaggttatcagcagtgagaaaaaggactaatacagtaaattggtaccagtagagtggggcactgctgaaaagataactgaaactgaaaagataactgaaaatgtggaagcgaatttggaactgggtaacaggcagaggttggaacagtttggagggctcagaagaagacaggaaaatgtgggaaagtttggaacttcctagacacttgttgaatggctttgaccaaaatgctgatagccatatggacaataaagtccaggctgagttggtctcaggtgaagaggaggaacttgttaggaactggaacaaaggtgactcttattatgttttagcaaagagactggtggcattttgctcctgccctagagatttgtggaactttgaacttgagagagatgatttagggtatctggtggaagaaatttctaaacagcaaagcattcaagaggtaacttgggtgctgttaaaggcattcagtttcaaatgggaaatagagcttaaacgtttggaaaatttgcagcctgacaaggcaatagaaaagaaaatcccattttctgaggagaaattcaagctagctgcagtaatttgcataagtaatttgcataagaatgttaatcaccaagacaatggggaaaatgtctccagggcatgtcagagacctttgcaacagcctctcccatcacgtgccggaaggcctaggaagaaaaatcggttttctgggctgggcctgaggtccccgtgctgtgtgcagcctaggaacttggtgccttccatcccagccgctccgccatcgctgaaatggacgaatgtagagcttggactgtggcttcagagggtgcaaacttaaggccttggcagcttccacatggtgttgagcctgtgggtgcacagaagtcaagaattcaagtttgggaatctctgcctagatttttagaagatgtataggaatgcctggatgcccaggcaaaagtttgctgcaggggtggggtcatcatggataacctttgctaggacagcgaggaagggaaatgtggggtgagagttcccacacagagtccctactggggcaccacctagtggagctgtgagaagagtgccactgtcctccagaccccagaatgatatatctgctgagagcttgtaccgtgcacctggaaaagccacagacactcattgccaactcatgaaagcagatgggagggaggctgtaccctgcagagccacagggtacagacgtggagctgcccaagactatgggaactgatttgctggatcagtatgacttggatgtgagacatggagtcaaaacagatcattttggaggtttaagatttgaatcccccactggattttggacttgcatggggcctgtagtcccttggttttggtcagtttctcccatttggaatggctgcatgtacccaatacctgtaccttcattgtatctaggaagtaactagcttgcttttgattttacaggcttataggcagaagggacttgccttatctcagatgcgactttggactgtggacttttgagttaatgctgaaattagttaagactttgagggactgttagtaaggcatgattggttttgaaatgtgaggacatgaaatttgggagtggccaggtgccaaatgatatggtttggctgtttccccacccaaatatcagcttgaattgtaactcccacaattcccacatgttgtgggaagaacctgttgggaggtgattgaattatgggggtggctcttttctgtgctgttctcatgatagtgaatgagtctcacaagatctgatggttttaaaaatggtaagttctctttgcctgttgccatccacgtaggatgtgacttgctcctgttgccatgattgtgaggcctccccagccacgtggaactgtgaatccagttaaacctctttctcttgtaaattgcccagtcttgggtatttctttataagcagcatgaaatggactaatacagtacaataaagggatatgataagaagaggaacataactgatgtagtttttaaggctggatcagtttcaaaggtaaattttgtttcaatatatggatataatttatcaagacgtctttgcccttttttctttcttacttgtgtggaaaaatcccaacccctgttaatgactatgcattcttctacttaagcaaacaatatggctggaacaaaccccccacacatgcattccctcatacaaccatgtttattagttatacttatcttacatttggattgcagtcatcataaggtcattataattgtacagaaatttaacctccttatatcttccattcactcttctatttgagatggctcttttctgcctaaacaaccctctttttctgttcttgaatccttatacccccatcatcatactcagaactaatacctactccttattcaactgagaaaatacatgcaattagaagagaaattctacactttcccatcaccaaatctaccaaactattaagtattttagtatgtttccatgagtcagccttcccttctcttatgctgaatgaattgcttctgttcatttaaggacagggccttctctttgaccatattccctcatactttctcaaagaacttcttcttgcatttatgctctctcttttctgtatcaccagttttctcctgttaacataattttccaatcagcataaatacatattcaatagctcccccaaaaatgtctagtcttagtctatctcaccctccatttcctaccttatttctctgtttccatttaaagcaaaattccttgagtttctctacttcctttcttcatttctttcaaccagtcaggctcttctagccccctatcctctgaaaatacaatgcaaaagtctacccacaccagtcaggctattttatttttatttttattttttgtgggtacatagtaagtgtatatatttatggggtacatgaagtgttttaatacagacatgcaatgcataataattacattatggaaaataggctatccatcccttcaagcatttattcttagtgttagaaacaatcttattatactcttagctatttaacaaaattaacttaaattacttttgactatagacatctttttgtgctatcaaatggtaggtcttattcattcattctaatttttttttgtacctgttaactctctccatctccctcacagcactccacccccatccctacactctgcttcccatatctgatacccatgattctactctctacctccataggttaaattgttttgatttttagatctcacaaataagtaagatcatggggtgtctgtctttctgtgcctggcctatttcactgaacataatgacttccatttccatccatttgttgcaaatgactgtatctcattctttttacagctgaatagtactccgttgtgtataactgccacatttctttttgtccattcacctgttgatacacacttaggttgcttccagttcttgcctattgtgaacagagctgcaacaaacatgaaagtgcagttatcgctttgacatactgatttcctttcttttcagtatatacatagcagtgggattgctggaacatatggtagctctatttttagtattttgaggaacttccaaactgttctccatagtggttgtattaatttacacttccaccaacagtgtatgaggatttccttttctccacattctcgctagcattttttattgcctgtcttttggatataagccattttaatgggagggaaagaatgtactttctgaggctacagaaaatacatccttttcatatgcctatttatcattttgtgtctccttttgagaaatagctattcaaatttttgcccatattttaatcagattattagattttttcctgcagagttgtttgacctccttatatattctggttattaatcccttgtcaagtgagtagtttgcaaattttttatcccattgattgtttcctttgctgtgtaaatgcttttcaacttaatgagataccatttgtccattttgcttgggttgcctgtacttgtgggttattactaaagaaatttttgcccagatcaatgtcctggatgttttccctaatgttttcttatagtagtttcataatttgaagtcttagatttaagtctttgcctatattgatttgatgtttgtatatggcaagagatggggtctagtttcattcttttgcatatggatgttcagttttcccagcatcatttattgaagaaactgtctttttcccagtgtatgtttttggcgcctttatagaaagtgtgtttactgtaggtgcgtggatttatttctgaattctctattgtgtttcattggtctatgtgtctgtttttatgacagtactatgctgttttgtttgctatagcattgtagtacaatttgaagtcaggtaatatgattcctccatttttgttctttttgcttaggatagctttggctactgtgggtcttttatggtttcatacaaattttaggatagttgttttctatttctttgaagaatgtcgttggtattttgatagggatttcattgaatctgtagattgctttagggtagtatgtacattttaacaatattgattcttccaacccacgaacatggaatatctttgcattttctggtcttctctttagcttttctcattcgcattttatagttttaattatagggatctttcacttctttggttaagttaattcctaggtatttaattttatttgtggctattgtaaatgggaattctttttttttttttagattgtttactgttggcatctaaaaatcctgtagaattttgtaggttgatttttatgttctacaattttactgaatttgtttatgagttctaatagttatttttgtgttttggtggagtgtttaggtttttccaaatataatatcctttcatctgcaaataaaaatagtttggcttcttcctttccaatttggctgccctttatttctttctcttgtctgatttctccagctaggacttccagtactgtgtagaataacagtggtgaaagtgtgcatccttgttgtgttcagatttcaggggtaaggctttcagtttgtctccgttcagtatgacactagctgtgggtctgtcatatatggttttaattatgttgaggtatgttctttctatacccagtttttgagggtctttatcgtgaggggatgttgaattttcagcatcaattgcaatgattgtatggtttttatccttcagtctgtttttatgatgtaacacattgatttatttgcatatgttaaaccattattgcatcctaagggtaaatcccacttggtcatgatgaataatcttttaaatgtattgttgaatttggtttgctaccactttgtagaggatttttgcatcaatattcttcagtgatattggcctatagttttttattttctatttatgtatttatttatttatgatgtgtctttgtctggttttgttatcaggataatcctggcctcataaaatgaatttggaagtattccctccacctctgtttttcgaatagtttaaatagtttgagtaggattggtattagctcttctttaaatgtttggtagaattcaacagtgaagccattgggtcctgggcttcattttactggtaagctttttttttttttttttttgaggcagagttttgctcttgttgcccaggctggagtgcaatggcatgatctcagctcactgcaacctccgcctcctaaactcaagcaattctcctacctcagcctcccgagtagctgagattacaggcatgcaccaccattcccagctagttttgtatttttagtagagatgggtcaggctggactcaaactcccgacctcaggtgatccacccaccttagcctcccaaagtgctgggattataggctgaaccaccgtgactggccctgggaaccttttaattatggctttaatcttgttacttattattgctctattcaggttttgaatttcttcctggttcaatcttggtaggttgtatgtgtctaggaatttgtccatttcttctagacatagtagctcatagtagccactaatgattctttgaatttctgggatagcagttgtaaaattttctttttcatctctgcttttatttgcaatgtctctgttttttcttagtctgggtgaaggtttgtcaattttatttaacttttcaaaaaaatagtctttcattgcttttttatagtgttttcttcattttaattttatttatttctgcttgatctttattatttctcctctgttggtttgggttttggtttgttcttgtttttctagttctttaagatgcatgattacattatttatttgaagtttttcttcttttttgttggagtcacttacagctataaacttccctcttcgtactgcttttgctgtatccagtgtgcttcagtatgttatgttttcattatcatttgtttcaataaatttttcaactttctgcttagtttcctcattgactcattggtcattcaggagcatattgtgtaatttttatgtctttatatagtttccaaattttctcttattgatttctacttttattccactgtggtctgaagagatgcttgatattatttcaattttttgaatgttttaaaacttgttttgtgacctaacatatggtctatccttaagaatgtttcatgtgctgcagaacagaatgtgtattctgcagcaatttgatgaaatgctctgtaaatacctattagctccatttggccgagagtgcagattaaatttgaattttctttgttttccatctggaagatatttccagtgcttatagtggggcgttgaagtctcccgctattattggattggagtctatctctttaggtctaataatatttgcttcatatatctgggtgctccagtgttgggtgcatatatatttaaaattgttatatccttttgctgaattaacctcttcattattatatagtgaacttctttgtcttttcttacagtttcttcctgttttccttttattgaagatgattttgtctggtgatatgatttagtttcttgttttttattttttgtatattcattatatatttttttgctttgaggttaccatgaagcttgcaaataccatcttataacccatcattttaagctgataacaacttaacatcattttcataaacaaacaaacaaggaattaaaacttataaagacttgatgccataacttcatacccgttttcttttaacttttttgttactacttatatcttattgttccatttttcttgaaaagttgttttagttattatttttgattggatcattgtttagtttttgtacttaagagtagttcataaactgtgattacagtgttgtaatattctctgtttttctgtattctcactattcagtgagttttgtatcttcattaacatttcttattgctcattaacatacttttctttctgatttaagtattccctttagcatttcttgtgggaaaggtctggtgttgctgaaatccctcagcttttgtttgtctggtaaaaggtttatttctccttcaaatttgaaagatatttttgccatatacattctaggaaaaaatatttttgccttcagcactttaattatgtcatgccatgctctcctggcctgtaaagttcccactgaaaagtctactgtcagatgtattggaactcaattttctgttatttgtttcttttctcttgctgcttttagcaccctttctttatccttgacctttgggagtttgattaaatgccttaggagtcttctttggattagatctccttggtgttctataaccttcttttacttgggtattgatatatttctctaggtttaggaagttcgctgttattatccctttctactcctatctttttctctaccttctctttaaggctaataactcttagatttgccctgttgcggctttctagatgctgtccatgcacttcattgtttttatttttttttcttcgtttttctcctctgactgtgtgcttccaaatagcctgtcttcaagcccactaattctttcctctgctttatcaattcttcttttaaaagactctgatgcattctttggtatgacatttgcatttttcagctccagaatttctgcttgattctttttaattatttcaatgtcttttttaaatttatctgatagaattttgaattccttctctgtgttatcttgaatgtctttaagtttttttcattcagatattgtgaattctctgtctgaattcaaaggtcacatatctctgtttctccaggattgttccctgatgtcttatttagttcatttggtgaggtcatcttttcctggatcatcttgatacttgtagatgttaatgtgtctggccattgaagagttaggtatttattgtagtctccacaatctgagcttgtttgtatgcatccttcttgggcaggctttccagatattcaaaatgacttagttgttgtgatttaagctgtatcttccttatgggggacctcaagttccctaatgctgtggttcttatagactcatagaggtactatattgatggtctaggtcaagatcccaaagaattctctggattaccaggcagagattattgttctcttcccttactttctctcaaacaaagtccctctgtctgttctgagccacctggagcagagggtagagtggcacatcacccctgtaggcaccacccatagcttgcactgggtcagacctgaagccagcacagcactggttctcacctaaggcctgctgtaaaccattccctggctcctgcctatttttgctcaaaactctgaggctctacaatcagcaggtagcaatgccagccaggcctgtgttctttcctttagggcagtgagttgccccaggacctagatcggttcagaggtgccacctgggagccagggactagagtcagaaaccttagaagtccacttgttgttctattgtactgtggttaagctggcaactcaaataaggagatgcagtcctcccatttttgcctcccctttccaaaggcagaagagcctcaccatgtggccactgccacttcaggcctatggggagtactgccaggctactgccattgttccctaaggcctaatggctatttaatcagcttctagtgaatgttgtcaagcctgagactcaaccgtcatggcagtgggcttcctctcttccccagagaaggtccagaaatgccatccaagagtcaagtcctagaatcagagacctcagagcccacttcatgctctaccaccctgtggctgagctggtacctaaggtgcaagacaatgtcccctttactttttcctccacttctctcaagcagaaggagtctcaccctgtagccaccacagctggaaatgtgctgagtctcacctgaagccagtaagtctcagagtctcactcaatgttcttaatgtagtacctgggtattgcttctggttattattctggttattcttttgttaagggcatgttacaaatcttgccatgactgagttcttcccttcaaggcagtaggttcctttctggtacatggtgtttctagaaatgtcatcaggaagctaaggtctgaacaggggctgtaagactgactggtgccctatcctgccctggctgagctggtatccaagaggcaagacagagtcctccccactcttccctctctgatcctcaagcagaaggaaggggtctcctttgcagccacaaactatgcagcctgaggttagtggaaaggtgatgccagcagtcccctagcagtcctggctggtgtctcagtaggtcatgaccccctctctccctcagcccacactgactctgggcccagagcactttagctcatgatggcaaggcttgggggaactgaagttccaaacactgggattggcaattctcctttgtgtggggcttgtttaaattctccctccttgggcgagcgtcacctgagtttggcctggttttgctttctgctattaacaagggcagcactgagttcaatgcctcagaattgctagctcttactctccccagtgcacagcaatgctctcagaaacaccaggctgcctctctgagcagggttgcctctactgagggatggcggaggggtggggtctgagattcaagactgtttttccagtgcctctttccgtggtatgaaggtaaaaccaggtagtgtgagtgcttacctgatttttggctcttatgaaggtgtgtgtgtgtgtatatgtgtgtgtgtgtgtgtgtgtagatagttgttaacttggtgtcctcactggggggacaattgagagagccttctattttgccattttgttctacccttctccccagtcaggctattttagtccctgtcttctgaaagtgcaatgcaaaggtcaccagttatctccatgttctgcaactcatggccatttttcaggctttctttttgtagagctctcaatatcatttaatcatgttttctcttaataaaaacatacttcatttggataccagaagggcacactttgtggtttttatttgacctcagtggctggtttttttttccccccccggagtcttgctctgtcacccaggctggagtgcagtggtgcaatctcagctcactgcaagctccgcctcccagtttcacaccactctcctgcctcagtctcccgagtagctgggactacaggcacctgccaccatgcccagctaattttttttttttttttttttgtattttcagtagagacggggtttcaccatgttaaccaggatggtctcgatctcctgacctcgtgatccgcctgcctcggcctcccaaagtgctgagattacaggtgatggctgttttttatctatctctagcttgctcttcttattctgcctcattcataaatttggcatgcttttaggctcaattatcatttatctatttacatatacttcttaactaatctcataatgtgtgagctggttactttataagtcatgtctctattcctaccctacctaccagatcatgactcatgtatccaactactagctcagcatctcatctttgctgtctggtaggtatctcagaactaacatatccaaaacagaagtcttgacaggtagggatactcaccgctatactaataaggaaaggcttcaaaacaaaagtcttgaattctgcctttcaaactttgctttccccaagtgtctctttcataataaatggcactatgattcactcagttaagaagaaaaaaaaaagtagcagctgtccttgaattttctttctgttaccctcaatattcatccatcaattagactggtcaggtttcccttagaagtatgaatcaagcaagactgacaagggtctggggacatgacacagttgaaaaaaaaaaagcttgtggcaaaagttaaaagagaagtctcattattttcaagaattggagttaggaggataataatgctaaatctcaggggttggaaagacctggaattaaactggaacaaagagtagagagttcttgttgctattgaggcaaccttctctttctgcctggaagtgttgcatattttctctctgcctgtaatattcttaattttatgataacatgcctaggtctgaaacttacagtttgagatttttcataatcttttttaattctctgaactttctctccataattttatcagttataccctcctctttatgtttttctctatggtaatctcagtatcaagattttggcagttttatttaatatatcttggtatttatttagtatatttatttacttttttgtagtcatctaggagaatttctccactttatctttgaactcagtaatacatccgtaagctgtacacacagttctccaatataggccatttatcattgctttaaaaaaatctcagctattatatttcctactaatattttccatgtggttcacttatcgataactcatttttttcctcatttacaaatatctttccctttgtttttaggcatattgacatatgagatactaaataaacattttaaaagatatgaaaaaataaatgattaagtcaatcaaatgaagattctgtcacagatggtctagtgctcgctttatgaatttctcagaggctgcctgtcatagatgatataaaagacatgtctgattaagtgatgaattgaattagatgctaacataatttcattctgttcttaggatttgtttccataaaaagcttaaataaagaaaatgtctctatttccttactagagtccatttatctttcatatttggtatcagaacaatcaacagcgtttgcttgacttcaatgaaacttttgtctgaaaatatgtatgactgaatcaaattgttcactaatttttattgctttaaggatatatattattttaacagatttcttttgtttagtagaactgtctgtcagagaatgatctttgatgtcattattagcttgtttacagtgttttctttgatgaaattattcattgtttttatttgtatagtttgttcataatattgtgtgatatgtgtaataaaggaaaagtatagttttgttactcagatgactggataaccttagagaatttccttactctaaaaatatcttcaaaattattaaagattatttttaaaattgacatacactttaaataaagttgggagctaatatatgtgtctgtaaatcaataaagtgtatatgatttcataacttgatttgctcatttgatttgtaattcaacatatattaactatagatatgtacttgatactagagaagcaaagataacaccattattttgaaaaaactagatttattcacgtttctaggacatcttttgcaattcatttgagggaacagtttttatagtgaaatgaaagcactcattagtgtgagagaatgagaaggctagctccttttcagtggatattttgaaaggaaaatttgaaaattagttcagtgaaatagattggggttagttgccagaaatctttccaaatatgattgagtagactgtcaaataaaaaaacaaatctggacttaggtacgagagactttattggaaaggatgtttgcaacgaggggaggggggcaattgcaataaggaaaatatgccaactataagatcagcaagtgtctcaaagggtaagcagtgaagtgttttgttttgttttagggaatagtaagcaagactagaaagaattgggtgtaggaaagtaggacaaatgagggtggtgcgattagggataggagctcagagaatgaggtaccctttaaaacatagtcagcctgttattaggagaggatgtaaatgaagggttgaggctgctgaggctgaatatggattagagtttaggggcctacgggaaggcgtaaagcttaactaaagtttgattaagtcgatgtagcaaatattttgtccagtttggtcagtggcccaaacagttcagctaatcatttatgaaggaaataatggcattttggaggtctaggcctggccttgtcatagggacacaagggaagtgtcctgcatctcatctaagttatatggggaagggttccttgcaataagctgtttctggaacacaaaggtgtgggataatttcttttaacttttgcttgttttccgggatcacaagtgcattagtccattctcacattgatataaaaagatacctgaaactgggtaaattataaagaaatgaggtttaactggctcacggttctgcaggctgtacaggaagcatagtggtttctgcttctggggaggcttcaggaacctctagtcatggcagtaggcaaagggggagtgaggcatctcacatggtgtgagcaggagcaagagagagtgaatagcagtggtgaaagtgtgcatccttgtgttccagatttcaaaggaaaggctttcagtctttcttcatttagtatgatagtagctgtgggtctgtcatatatggtttttattatgtagaagtatgtttcttctatactcattttttatggtttttatcatgaaagatgttgaattttatcaaatgcttttttagcatctattgaaatgatcgtatggtttttaatcctttgatctgtttgtatgatgcagcacactgattgatttgcctatgttgaatcattctttcatcccagagataaaatcccacttgggattcatgatgaatgatatttttaatgtattgttgaatgcagttcgctagtactgtgttgaggatttttgcatcagtattcattagtgatattggcttatagttttctttttttcagatgtgcctttatctggttttagagtcaaggtaatactggcctcatagaatgagtttggaagtattctctcctcctctattttttggaatactttgggtagtattggtattaattctctaaatgtttggtagaattgagcagtgaagccatcaggtcccagggttttctttactgtgaggctttattacagctttgatcttgtcacttgttattgatttgttcatgttttgaatatcttcctggttcaatcgtgatacattttatgtctctaggaatttgtccatttattctagatttttctaatttattggcttgcagttgctcatagtagccactaatgatcctttgaatgtctgctgtatcagttgtacagtctccttttatgtgtccgatttgatttatttggatattttctctttactaattttgagtttgggttgctcttgttttcctaatttttaagatgtatcattaggttgtttatttgaagcttttcttcttttttgatggagtcacttatggctataaacttccctcttagtactgctttggctgtattccataggttttcatatactgagtttccattgtcatttgtttcaggaaaatttccaatttccttctcaatttcttcactaacccactcatcattctggagcatattgtttaattttcatatatttgtatagttttcagaattcttcttgttattgatttctagttttattcagttttggtcagagaagatgctagatattatttcagttttttgaatattttaaactgttttgtgatctaacatatgatctatccttgagaatgatccatgctctgaggaaaataatgtgtattctgcaatcactggagtaaatgttctgtaaatatctgttacctccattttgtctagagtgtagattaagtttgaagttgctttgttaattttttgtctggaacatcggtttagtgctaaaagtgggatgttgaaatctccagctattattgtattggagtctaactctatattttaaaaattgttatatcctcttgctgaattgaccacttcattattatatagtgaccttctttttctcctttggtactatttgccttgaaatctattttatctgaaataaatatagctactcctactcttttttggtttctcttggcatggaatacctttatacctttattatcagtctatgagtgcctttataggtgaagtgtgtttcttataggcaacagatcagtgactcttcccaccaccgcccacccgccccaccttgtttagttagtctatgtcttttgattggagagtttcgtccatttatgttcagtggtattattgatgactaaggacttactcctgccgttttattatttgttttctggttgttttgtgatcttctcttccttttttctttccctcctgtcttccttttattgaaggagattttgtctggtgatatgatttagttttttgcctttcattttttgtgtatcccttgtatgttttttggtttgaggttacaatgaggcttgcaagtattactttataacacattatcttaagctgataacaacttaacactgtttgcataaaccaactaacaagcaaaaataaatgaaataaaaactctacatcttaactatgtccctgctttaactttttattatttccatttatatcttattgtactatgtccagaaaagttgttgtagttattatttttgattgtttcatggtttagtctttctgcttcagagtagtttacacaccacagttacagtgtcacagtattctgtttttctgtgttcttaccattacctgtgagttttgtatctttggtgttgcttattcctcattaatgttcttttctttctgactaaagtacttgctttagcatctattctaggacaggtctcgtgttgatgaaataactcagctattgtttgtctgggaaagtctttatgtctcctttatgtttaaaggatattttcactgtatatactattctaggataaaagatttttttcctttagcagtttaaatatgtcatgacattctctcttggcctgtaaggtttccactggaaattctgctgccagatgtattggaactccattgtgtgttattatttatttcctttcttttgttgattttagcatcttttctttatccttgatctttgggagtttgattattaatggccttgagattgtcttctttgtgttaaatctgcttggtgttgtataaccttctcgtacttggatattgctctcttactctaggtttgtgaagttttctgatattatccttttgaataaactttctactcctatctctttctctgttccctctttaaggccaattaacacttagatttgctcttttgaggctattttctagattcggcaggcacgcttcattctttttaattctttttttcttttgtctcctctgaccatgtatttttcaatagcttggcttcaggctcattaattgtttcttctgtttggtcaattctgctattaaaagactctgatatgttctttaccatgtccattgcatttttcaggtccagaatttcatttctgcttgattccttttaattatttcaatctctttctttaatttatctaatagaattctgaatgccttctctatcttgaatttctttgagtttcttcaacaaagctattttgaattctctgtctgaaaggtgacacatctttgtttttccaggattgttttctcatgcctgatttagtttatttggtgaggtcatgtttacctggattgtcctagtacttgtagatgattgtctgtgtctgggcattgaagagttaggtatttattgtagtctttgcagtctgctcttgtttgtacctgtccttcttgggaaagcttttcaggtattcaaaaagacttggatgttgtgatctaagttgtatctgctttgggggggaccccaagcccagtaatgctgtggttcttagagactcatagagatactgccctgatggtcttggacaagatctgaaagaattctccagatcaccatgcagagagttgacctcttctcttcttcttttctttttctttcaaacaaatggggtctctctttctctctctctctctctctctctgttctgaaccaccagaagtagggtggagtgacatactgtgttgggtcagacctgaagccagaacagcactggttcttgcccaagacctgctgtaacccctggctattgcctgttttctctcaagaccatggggctttacagtcagcaggtggcaaagccagctaggcctctgtccttccattcagggcactgtgttatcccaggccccaggcaggtccagagttgcctattggaagccgtgaactagagtcaaaaccacttagaagtctttctggtgttctattgtactgtggctgagctgaaaccacaagacacagtccttctcaatctttcatcccctttccaaaggaaggtatgcctcaccccatggcaactgtcactacaggcctgcagtgagtactgccagcctactgctgatgttaccttaaggtccgtgggctctttagtcagcttgtgctgaatcttgccagtcctgagactcacccttctgggcagtggactcgcctctggccaaggacaggtccagaaatgttgtgcaagagcccagttttggaatcagcaaccccaagagacgagttggttctctaccccactgtggctgagctggtatctaggtgcaagacaaagtcccctttacttttccctccacttttctcaagctgaaggagtcttgccccatagccaccacagttgggaatgtgctgagtctcacttgaagccagcaagcctcagagtctcacccaagtttcttgatgtaccacctgagtattactgctggttattcaatgcccaagggctcttcagttagtaggtaatgaaggctactagtactgagtttttcctttcaaggcaaagagaaaggattatcttctggtgcaagatgtctagaaatgttgtattggagctagagcctggaacaggtacctgataactctgacagatgccctaccctgctgtcactgagctgctatccaagatgcaagacagagtcctttccactcttccctcttctctccttgaatggaaagaaggggtctcttttggagcttaattgcctcagcttgtgtctcagtaggtcacgtgccccagcattctactagctctggacccagttcatcactaggactcacctaaaacttgcattgcttatggcctagactgcctttccagtttatttggagccccagaacactttagcccacagtggcaaggcttgtggtaactaaagtttcgacagctgggatcagacatatccctctggctaaggcagttttaaaagctccctccatggccaggggtcagttgagtttggtgtggttttcctttttgttataacaggataacactgagttgaacgccttacaattgctgtggtctcccttccccagcactcagaaatgctcctgctgagggtaggagaggagtgatgctggtgattcagaactgttccttctaccttttcagtgcctctttcagtgatactgagttaaaaccaggcactgtgagtgctcatctgatgtttgattcttgtgaaggttcttttgtttgtttgtttggatagttgttaaattgatgtctttgttggggagacgattggtggagccttctattctgccatcttgttctgcctcccaaaagtaacaattttttaataatagggaaatgattcatgcatgtgtttgtagtcactaaaacaatatttgtgaaaagtttctctataaagaaggatttatgttacaccataaattgagataaagtcaatttacatagaattgtatttcttaacttattcacattaaaattttaactatatattttatttcaattataaaagtacattaaaacatgcattattaatacataaaataaatagtacattgaatgccaacctagtgtcacgtattgtattatacacgttggggtactgaacaaagtagctagtatctacatactttctggtggagttgtaagacgtgttttacaaaaaaagtgtagagtgcacattgcatcaaataaaatgctaagaagtggggtttggatagttaaattatagtttatttcaaaagaatgacttatctgatatatatcgacatttatatctatgcattttgtgagcaagcaaaagtgcttctggtgttttagagtcattgtattatcatgtcattatatatcctccatgtttgctccaatgaactttatataattatgtgaagagtttttttttgttgttattcttgttccatttatatgcccccaagttgtttatattttatttttttaatttaaaagccacgctattgtttaattttaagaatttttaaatcatatagtattaaactcctttttttatatttcacaatcttcttttgttgaaaatgtccacctcatagtgatgaaatttgagtagtggacaggtatattaaattttgtctgctgattaataaacttcatagtattttgttactttatttttccagagaagacagattttacatttgcatatattacgttctttttctactagtttatttttattttttccttatttcttcaggatatgctcaataaataaccaggtctgttaagatataggtgaaaagtgacttttgaaatgataccaaatatattatattctctgttgtgttgtattccattatgtatatacagtctgatggcaaaatcctcaaaagaaattaagggttttgaaaaaaaagagaagtacagtaattgaaaatgcataatttcttggtctattggtataatatgtgtgggagataaacagccagcctcttgaaaggactgcagtagaactagtttgctcaggcaacaactaggtttcaagaagagcggcagagtggataaaatctttagaaaaaatgcgagtgcattttgataatgatttactgtgaatgccagatgacacagtgaaatgtttccagatgatgggagaagtgaaagatgtggttacagaatgtaatgcattagaattagattctctgagtgatgagagtaacctgagctgcttatgttgactcacatacttcggaataaagaatgtgataaaattatgaaggtctcctagcaggaagtggtggtgagactttgagacttagagtggaatgggggaagctatttccagaatcatgcagagcttttggtctctcgtgaatttatctctaacagctgagacctctaggcaatagtgggcagagagtggggaaagttttacccagaattcagttactgtcttgtcatctgaagatggaacacaccaaactgggctcttacaccaagcacatgagtttcctttgatttctgttgaagcaggtctctaggttatcaaggaagaacattattaaacagttttatttaatgtggttgaattctaaaaatgaaaaaaatgcaaatttttaaaaaatagcaaaatattttaattctaaaaagtatttgtgttaccctgtaatatacctgtaacactagtcctcacagaagataaagtagaagtgaaaggctatcttaatgtcaattcatgaatattctgttgctagagcagcaaagttatttctgagtgttgtatcagtaagattaactattttgtggaccccaaatatagattacaatgcagtaccaataaatatttaatcataactttcttcttagaccttaatgtgaattgtctctgagtctctgagggaattactccagaaatctttttgttgttgttgttttttacacgaagtcattaaatatataaaatggaaatatctcaattggacaacagtacataaagtcctttacctaagctgctgaatttgatgtgtaaccctcatagtgaatacactacagaacaggtattaagaggacctcttggatggataaataatgcatataaaaagagcactaaatttagatcccatgctatatctaagacaaagattgtagctaatatcttctgagctcaatatgtaccaaatactgtgccaagtactttcatacctttcctaatgtgtaaaacaatcttaagtggtaggtaattttatcctatgttttaaccactgctcctagtatatcacctgtctttgtgactttgtaataaacacgaaactcttctgggcctcaggtaaataaaaagtaaagtgtttatatacacacctcttgtcaacaagctgaggaaaaagtattgatctttcttctccttaagtttgcaaataaatatagttaatgatggatatataatagaaaaaagacaaaattgaagaacttgggaggaatttctgtgagacattcctatctgcttgtgccactcacgttattaagtacttgtgttttttcttacccaatgtcctttgaggcattttagaatattgtttgtaaatatttttaaaaatttaaaaagcctttataattaaaaccacattagcaaaagagaggtcagtcaacagtcctttgtttatgttttaatattttgtcacttttacaggatttaagtcgtggaactgaacatttatttggctgatcctcatcatgaaccgtgcttttagcaggaagaaaggtaagtgtggtcattttttaaaacttgggagtcaagccaatgttgctatgaacataagcagcgatgttaagaaatcagtttttcttgttgtcaaaccacctggcccagaaatgaagttagattagagcaacacaaatctgcaaacgttgctaattagctttccttagttatcaccctagtgaaagatcaaagttgtttattacactgagttcacaatacatatgtgataatatgtcgcctggcaacttgaagcttgttgtgaaattgcaaagaataaaatgatctgaaactttgtcctaactttagcttatgtagccatataatactaaattccctgggcttacataagattatggtaacataaattcattcataattgtgtgtgtgtgtgtgcacaggcttcatgtatcattgaacaatatgtgaggattggtagtagatagattgaaagcaatgaggccacaataagtttgttattaatttttaggtaggaatttaaataactacgaatgtagtatattatagtgatcactataggactgaaagaaacagctagttagatgttgttttttaatgggcagaaaaacatggcatttgacaaactattttatgatgcacttataaagaaagatagaaaaataaatataactttgcgtaggtcagtgaagtttaaataatgtatcctttccattctcaaaggagttctctagtggagagcatggggctctctcctgttttacattattgatgaattggggaagaatgcttaaataatgataatcaaattcataggtgattgaaagcaagaaggtgatgatacatgaatgctgtagtaggattacagatgtgtgaggaaaaaatgacaagttaggccttattccacactataaacttactaagatactgcaaattgtcaaacaagggcccagaaaatctaatacttttatcatgattcaaatattgctgttatttggaagatgcatcttgaatgctgtcagagtaaaaatggctgaagaataaagtcaacagtgtgagtatcaaaggctctgtgtcattttctaatgtatggatggataatgaatagtccagaactatgactagtgttctgttcagtatcaggcagttgggcactgggtgttctccctttaaaaggttacagtgttaactgacacatagtaacgtgcccagatgagaaagactgagatgacttcaggactttcagccatgtaacaggaagcatgactgagaaccattcatgtgttaatgagagctgtctttcaatatttgaaggactgccatttagccatggggttgagtttagtaaaggacaaataggtgtaaatgataatgtcactgatttaatatagggaaaatgaattccaagaaagtcaggtaaatgtttaattaaattactcaaattactagctttttttggtctctgaagtgagaggtgttcaaacatttggatgtggcagagaagattaatgtattcagtgagaatttagataatgtgacctttaaggcactcttcaactctgggaagctagaaatttattattttacttaattttcctgaataaggggaaagcaaaatgacattgattatagtctgtagctgcttctgatttacaacaggtaccaaaagtaaaatagtgtttctttcatttttactagtaacaaaatctataaataattacatgatatattgaagtttttgttttgttttatatagagataggatcttgctacgttgccagggctggtctcaaactccaagcatcaagtgatcctcctgccttggcctcccaaagtgttgggattataggcgggagccactgtgctcaatctgaagtatgtttaataaagtaatagaaatcttacatcacaacttaacactttaatcactctaacttatttttaataaatacttctagaccttctttttatatatatatgcttataatcctcctttcctatcactttaaagttgaaactccacatctgtaatttactgtttatttgaagggggtttagaatggtttttcattgagaaatcccaagagttggatagtaatgtgagtaaccagtaattgtatatttgtcttatttgaacacagtgggagtacaaccataggaatagtggagtgatttggagaatcaagaagcagaagcacttgttatttcctgatttgcttcattctctttgaatttcttttgacttctcttatttttcaggtctaatgatttagtatcatgaaattattcactaatattttactccaacctgaagttaaaacttgaactgaaaattttcccttaagttcaccagtcaatcctgactctatcatttggtgaagttgttaaagaaaaaattttaagagcccccgctcctggtttcaatcaataacattatttcattaaattttaatttcagatgaaaaacttaaattgtttgagagaatttgtatatctggataagctggagccataagctataattatatcactagagaatattttatttaagtcacgtttccaaaactaccatcaacataccctgtgtacagtatcctaaacaaagcaaggtggtcttctatcagtaaaagcttatctctttatttcatagatacccaatatacttggccatcacatgtaatcttactaaatgatccaggacctcagaagcctaaggaaaaaagaccatcttaaacctaaacataattgtgttttttttttaaattaaatctccaaattagtaagtttgtatttcttgattgaattcactgattttctttgcagatgctctaatggtgttagagttactcagagattctgaagagtgctgaatatattacagtcatatcattttgagctcttttgaaaagatctttaaaaattagtctaatataatcatagacgaaattttagtgattgtctttgttttagattttttcccaatgttaattttcttttaattaaaaaaattttatattctatttattacatcaaatataaatcattaagtaaaaaagtataaaaataacatgtgaataaatgattaagtaattcaactagttacatttttttaaacttagttgacatactattgagtagatatcaaatgcacagcacttaaaatttaatatttaaatgttactttcttttttaacaaacattttattcaaatgtatctattcattaaccagcatttagttttaaatttaatgtactcaaaagtaggtgtttcaccattgtaagctctgatgatacaaaaataatgaatttactctatatttcctgatgagttcttaatctagatgcattttgaaaacctaaatttattgacccagcaatcagagtacattgatatttgtcaaatatgttgaaatgttggcattttccttcatgtaagtcttcaattttgagttagtgattttactttaattcaaggaagaggaactctttctagaatgtctatattcccatttctgcacattttcatatatctaataccttctatgaacacatatagtgaccaaggaccagcatgtgtatttcctactcaagatttagtcctatctataagttaatataaaaagttttattttgtcatttttttgccaaagtataaattaggatgacagtaagaactcattttggaaatccttcaggttttataaatgtactgctcatacctgaggatatgtaataaacaaacactaaattatcagtgcttgataatatggatgcagatttttgtcattgtaggagctacagcttatccactggaatttaatattgtgattattttagtctgtcagcagaagcagcttggtatactctttttaggtcgctgcaatatgagtctgtaacagaggcattttcatcagttttcaagtaatagtggtttataggagaaagaaattattaatacctctctgcctcaggattggtgtgacccatcatagtgagagtttagtcagcgtttacatactcctgagatgtgttgtatgttttggaaaggagacatgaaaagaattaagtgaaggagttaaaaggagaaattggacatcttagttttcctaaaggtgtttttcttgttttgtgttttattgccttggaagaagtattgtgatttacttcttttaatgtataaaagcaagactatattccaaatctaagtgcaaattattcttgaattaatcatattactatccattagcaatcacaaaaagtatagctaagatgacaatccttatagaaaatacaaatttcacacattaaatgtcaacgtcaatattttttgaagcttagaatgtattgctgttcaaaatatttcacccaagtatggctatcatatattcactctagtagtcagaaatagacccaattctcttggcccttcatcttttgtattggaaatacttgagaatattgcattgtaccccataaacaaatttaatatgaatacagtgcattattattcaaatagtataaaataatttacattccaaaaatatgtgtcattttctctatgtcttcacattaacccagtttaagaagaacatattaagggtatcaaattagtttctgttaacagcatttaaaaaaatccaaatttaatgttgaaactactttgttagtaatacaatatttccttccagtttgtatttgtatgtttcatggtaaaataaatctttgattttgttctatttataatactgattccaaattttaaactcccgtgaaaaataagatacgtacaaaactacactaatggaggcaaaatatcattgaagattgagaagtcttactccacataagtgcagattcaaaaaaagccaatctgtttcatgtaaatgttaacatttttttctccccattatgcattcctcaaaatattggggaaaatatgtgggctatattaataaagttcaaaaattaaattgaaaatattagtaatacaaatataaataacaagatataaataatatataatacaattacttttaatatattctatccttttatttctaatatttttaacacttatctaagaaacattttgatttactgcatttgagactatttatatccaaaactcctgagagaagaccttcaatcagtgtttcctcaaatttagaataaagatttatcataatattatattgatttccaaatgaacacagtaagttggttaatttcagcttcatacaaatgcagttgttagtataatatgataatttccctttagaataactaaatcttgatgctacaatataatatttgcaaagagttaaagagcagattatattttattgttctaggaattaagaaaaataacctataattcatgagagcataaagtgaaagaagaaagatacttgttttaaatcacaaatgaatgcaattactcatagcccactgatgtggtttttatatgttcttttaaaatttggtatcatttttattatttgaaaactttaaaaagaaaagctagggatttttataccaaagaaagaatcctataatcacgccccaactaaattgttcttctatctgagtggttattctttgtcattttggcaaagaatctcagaattagaaatactctgtgtcctaaattaccatacaaatggtaatgcgtgaatatgacaccatggaaacctaaaatttaactctgtgtattttttattgcagacaaaacatggatgcatacacctgaagctttatcaaaacatttcattccctataatgcaaaggtaaaaatagttcatttattatttaattttattttgttatagtatcattactaattcatggctaatctcagattgcttatgtattgacatttcctggttattgattcctgaaaaaagtttacataaataaaataattgtggcatgggaagttatttttctctgtagaatagtttctctttttaaaagtgtattatttaaaattactgttttagtcaaacgtgttttcttcaagtgatttttgttattgttaaaaacatttgcaatatcatggcttgtagaaactcaaaccactaacaaattagctttctttaaaaacattaatgttacattatacaacctaaatataaaaacctgcaaatgagagaaatgagctgcaattttcataaatgtaattatcattcaagaaaaaaggaacaaagtttaaatttttattttattttattttattgagatgaagatgtgctctgtaggccaggctggagtgcactggggagatcttggctctctgcaacctccatctcctgggttcaagtgattctcccacttcagcctctggagtagctggaattacaggcatgtgccaccatgctttttagaagagacggggtttcaccgtgttgcccatgctggtctcgaactcctgacctcaagtggtccacctgcctcagccccccaaagtgctgggattacaggtagaagccactctgcccagcctaaattatttttaaaaagcacacaaaaaggtgccttttaaaaattcttttgttcaagttgctgcattttaatagagaaatggaaacattaatctacgctctgtgtctttaaagatttcatttgttgttgaaaaaaatgagtgaattcagtttaaaacagagactttaaagaaaggtgctattttgtagttaattatcaccaaacttgtaatagttttcagagagatctgagtcaaaatttcgaagagtcagaaatgagttaaagaggggattggaaatattagcgtcaaatttaaaagcaactgaactttggagacagaataggggaaaacaaaactataatatctttataagagaacttaaacgtttatggattagtgaagtatacactgggatacagtgagattaggcatagcaattatttcaggaaaaattaaagaatgtttattgaggagaaaattaacggtgtttggtaggaaacatctagagttcttacctaagtctgaatcagaaggaagaaacatttaaaagcctatgtagaagaagttcttccagagctgttgttcagcagcgaaatttggagagtgcaccatctcttatttttttcttgctgacttaccagcaaagaaatctgaaatattttctgtgtaaacatattatacttgaaatcactgcagtgcttatgaatttttctataaacttaacataaaggctgattgccctaatttagcatgaaaagtttagttaactgaatgagaaaaattgtttatgttatccatcatttccacagatattgtttgtattagctattggtatactatatgaaatctatactgaaaaaattttaatctggaaagctgctatgattttaaaatgcatgctcaattttttatattatcaatcatagtggaattatatgctccagttgaaaccattaatatttttatgtgactgatatgcctcattttgaaaaacagctttataaaagattaaaaggttatattataattagatctacctttaactccgccaatcattctgcttgtctacatggaaaagttgccagtgccaattcacaggtgcataacaattttaagacattctacaggaagtagagggtgcaaaaacatcttcccagactgggaacagtaaaatatggaagggcaggatgattttgtctactataatatggcctcatgagtgataatatatattgtatgtgtaccaagtagcattaaattcatttgaagaatgttagtttttttctgaagtcctttgtttgtggcacttattaggatgacctcatagtagagttactttttaagatatcctgtatctcttgttatagaatatgccacttgaaaaccaaatccttgaccacagaaagtagcttggcacaatagaaaaaaaaatacagactctagagctagattccttggtttatatcatgactccaacacttatttactgtatgcctttgggaaaattgcttaacctttctatgtctgtgattactcatcagtaaatagggatagtaacaatagtaatttctcacttgagttgttatagacataaggaagttagtgctacaacagtgtctgaaagagtggaatttttttctcaggcaaccatcagttctgtccctcagttctgttcttagagccattcaattcactggatctggctcatccagattatccaggataatctttacataaagtgaactgattagagatgttaatcgtatctatgaaataactttacagcaacacctagattagaatttgattgaataactgggcactataacttagccaagttgacacataaaactgatctcatacaagtattaatgatggacaaggttaaaaaggcaaattgggaaggctttgaatggcaaaagcaacagtttggattgtaaatgaatccaacaggattttaggaagataaatcggtagtgataaaaaagtcagtttgaatcaagagtgttagaatgacattaaacctcttaggaagttattttaatggtccaagtatgtggtaataagtttaccatagggtagtagataaatttgcagtggaaaataaagatgtgcttaatattccagaggaagaattgatataaaataggaatggtatataagtagagaataagaaaaaatatctattttcatcctggctaaaagagagactcatcataccattaaaagattcctactacttcactcacttttggcatccactggttacaaattaatctgataaatttaacagaactacttaagaattattattctccctggagaaatatgtaataacatttatgtttaaatgtcttcagttttaaagcattagtgttctgttttattttataattcttttttagaacacattttatttctacattctttcaatttatggaacattgatttcaaaaattcacatttaatattcatagtgtaatgatttgagatcatttgtcgatataaaataataaatggtttaaaataagcattgttctatgtagggttcattagttttggagttttctttaatgtgcagtgacagcattaatattagttcattgggaatcttttatattatcctgtgtactctgtagtgatgtttccaagctaaaggttattacctatgaaaaaatgtggtcatgaaatcaggtagtaggtcatagggacatatatttagagatgggtagcaagggcaaaaaaggtgattgcagttcaagctgagtaggagctagaggagaagagtactgagaatttggatgtattttgaaagtaaagttgacagaatcaatagattaggtattagattctattgctactataattagaatgttaatgcagaaatttaaaaaattctgttcccttcaattttttatgagaatgctaaactctcttttctataaagataaaatgctggcagacttgtattttaatcaatttatttttctgttagagtgagacagtcatttcctagatgaagaattgtgacaaatgtttcattgaaactttttttattgaatgttttattctaaaatgtataattatcccccaaaaagtttaatgtatttatccttttatgaaaaatctatctttaagatatacaaaaatgcaaggatgtttaagaatgaagttataaagagattactaccttactttgcatgaggcagcagtaaagagagtgagtattccttgattatctgtctactgtgttccaagctctaaaagtgagcaaatgtaaaacaaatagtaacacggaccttcaccttaaaaacttatgacgtccctgtggagaggaaacagtcatatgaaacatagaaagaattttggaagaaaagtacataatgataaccaacatcatgtcgttatcttctaaactatggaacatcttaaaatcaaatatagaaatataacgcattccttgcaaaccctttcaaaaccatgtcagggagttttacaagtgagaaaactacatagctaatcaacaacaaaataaaatacaaatgtcaaggagaggtttacaaagaaagattaccttacatttcaaagttttctagaggtgtcagagttttacatatgacacgtgcactgtttgccacttcgtttgtttaatcagagagaaggcttgctggcccagtgagttgtgtggtttctagtgtggctttctcatctttacaacctaaatttgccaacaaaaaaattacctatgagcctttatttgggttcaaaatacaaacaaaatgacaaagaacaaaaacactgccttcatcccctccacacacaaaatatgtaatatcagatgtgacagtaagatattagaacttgaggattctaacccttagttggttgaaaaccacgttggacacttatgtttcaaacttttaactaaacctgcccaatagtaatcctagaaaaatcagaacctacgtatctgacatgctcagatgcacccctcaagagtaagctctataccaacaactccactgattctaccagaattttatagccatatagttgctgcatcctattacagtaattagagcagccatttctgggtcaaactatttgggttcaaacttctcctctctcaactgttatcagaattatgtaacttttctgtccttgagtttttttacttgtaaatgagattaataactacaaatatcaaactggtttgttaggagatttaagtgagttaatatatttttttaaaacttagatcagtgtttggtatgacaaaagtttattgttattaatatagttgttatagaaagtgttctgtcaactctggagttgacactagtcattactatctcttgagaataatgtagcattgaaaaacagagaatgaactacttagaatgtgtatcaggtattttattttttctgtttgcatcaactgaagtacttgcagtgaccactctgaaaggttctatggggaaggaatgctttttcctgaagcacaacaggagactcaatacggccaccttggtggaattatatgcaagagaatgctttgatcattaaagaataatactgttgtgattatactttcctattaccttgaagtaataggagatactttgaggtaacagcattctggaacaaaatattaatgcaaagattgtcctggtcttaaaatcaaatatagaaagataaggtagtccttgtaaaccttttgaaaccattagggagttttacaagtaatcagttaatgaagagagaaagttacaacattatttggcttaatgagtcatagtaaagacgggtcttaatataaaaaaaaataattttactaatgctctttaaattgttttttgagaacatatgataaattacccttcaatgaaatattaagattggtatatgacctaattgaaaaaaattcaggttttagaaataaatgacatctattagtgtgtcaaaaaaaggaaatgaaagaaaaatcttcagattcaactctttggaatcgttgaaagttgggcaaaaggtacacctctgtaatcgatgagatgccttgttgaaacatcccaaatggttttgaattgcaatttcatgagattctttagagcagttttatacaagcagcaaacataagcacttgccagttttgctggttgtagaaaccaggggaaatataagaaacgtaaagagctcaattgcatttccagataatccatatcatttatccgaaaatgagtctttaatttcaaagcataggaaccactttaaaatttggtgttacatgacctttaaaaaacattttattagattttagaactggtctttaataatgctaatatatatcatttatattcattccaaacattttaaaattaaagaatgagcatataaattgaagcttaaccatcatttttctaattaaacaaataatatatactataatatgtattgataatttgggatctgttatcacttggaatttttgctttatgtgccaaagtaatactgacacgtgtttaaaaggaaattagaaatctgtaaaatgttacctttcccttgtcctctctacagtgggaaactatatggtgttttttatgccaaaaaatatgaaagcaaataaaagtgtagtaataactggaattttattcaattgtgatttgtattaatagctagtatgtgcttacaaaatacaagaacaaatggagaaaaggaaatggcaataaatacctaacattgcatggcttctggattcttgagataaactttcagttaattctgaaggttgtcatcattacaaactataattctacatctgagagtactctaacaagtgttatatagctgctagaaattattgaataggaactaaaaacttttattagtactcattacatttcagtatttactatagtatcattttatttttttaaaaaaggcagtatatgtgttatggattcaaagacagttttgaaaaggactttagtattcattattcaaactcggttattttcttgataaggtcattcaagacccagagaagttgtgatttgtttaagcttacacaggaagatagtagcaaaattaggtgttgaatgaagtatccgatcctgttcaacatccgtttgtctatttattgcgatatactgttcctaattttggagagtacttaaccagcagatgaaagacctaaagacaagtaaaatatgtatatgtgtctgccacttgtatatgttgtatgtgaaattgcttcatctgtggaaccctgcccctgtctgttaaatgattctctggacatcattttaaagtaggcaggggtttggcagagatgtgagtgagctaagtagactaagtaaagtctatgtattagcctccctaacacaggggccacatgtctaagcttccatgaagtattgcatctttctttcttctgctttgcttaatgatatttttattaacataattcctggataaaaatgctttggtgttatctatgtccttaaatgcttcttcaccttcagagcatctagtgatacataggacattttctgaaagttgaacatatttatcatttatttcatatttctgcatcgatgtgtttggccctagatgaaataatttttattttatttttcagagagggtcttactgtgtcacccaggctgaaatgcagtggcacaattttagttcactgcaacctctgcctcctgggctcaggtgatcctcatacttcagcctcctgagtagctgggactacaggcctgcaccaccatgcctggctaatttgtttgtagagatggggtttcgccacgttgcttattgctggtcttgaactcctgagctcaagcgatccacccaacttgacctcccaaagtgctgggattacagggatgagccaccatgcctagccgaaataattttaaaaagcttgttcatagctagagaatgtaaagaaagaaaagaaaggactgatttggtctcaaaagggtcaagcaatagcattctgaagactggactgtgagacttaaggatctgagcagaaaggaaaagtagagattacagttttggaggaaaaaaaaacatgtttccaaaaagtaaaaaacatttaatgtttttatcaataccatttcagtaatggtgttttgatgagccactaaaatcagcatataagtgactaaaatcagcataaaagaaaattagcaaacaggtgagcatgttttttttgttttgtttttgttttcttaacagagaacgtaggagaaatgagaatgaagaggaaaggattgttaagagaagtaaaatgtggcagaaaacaccaagattttggaaataatttagatgtgaacacagaaattgatgttatcaatggattatgtggttgcttttcaaatattgattaggaaaatggtaggtgaaagcaatttgcctccagattcactctttgtcatttcattcaaaaggtctaagatgaggcaggtggccagcacactctagagacactaaatctcttcagaagacaaactaagatttctattcatgacattctttcattttaagagacattttaaaggaaataatgtctcagcccttaggcaacatatacataaattcacatattttacatcaaaataaagtcatgtttgtctttcttgtagtattttgaactacaggaaacttcatttccagagctgttatgcatatttttacatttaagaatagtctcctgttgtgcacttatttcttcagtttccagaaaagtgtgtatcatctattttttttcctttttgctagaactaagtggtttatttttctaaacctttaaatcattttcataaacgtaaacatagactccagatagtatatcagatagtattaaaacacctcctctttcaatatcttgcacagatgtgatcgcaaagcagtacaaagaggttgctgggatatggtgtaattcatacaagcaaaatctgaggaaaaatgtatctccaagtatggaaaacacaggataacacaatgaaaaatcaactgtttacattattaggtcttcaaagtgttatatatttaagaacaataacttttattttgaaaacacaatatgtgctaattattaaaatttaagcagtacagttaagcacagaattaaacacattgctcaaactctatcaggcagaaataacccagtatagacttttggttaacagtattccaggcatttctttgcataaatacaagtgcaagaatggaaatactgatttaaaaaaatagcatttaacatataaacaagactccaccaataattttctaagcatttcacatctgtcatctcatttaatccttagaaaagcccagtgagattggactatttatacgtcccatttaacagctaaacaataacatgaaactgtaagtaaggaaagtgatgctggggatgaatggatagattcataggaagaattaactttaaaaaaaaagaaattatagcatggatactattttaaaataacgttgaactttaacagaagaaaaaaaagtgaagtgaattgaaggtgttaccaaattttttatatatctatctctttgccaaaagcgatattagttcctaaaaggttgttttaaggttcaagaagatgattatgaaagtcattaagtgtttggcatcatcgtgtttttccttaatagcacatttcaaattttgacagtaatgcatatcatacatgaatgatgaagtgaatagctgacttaaatttctgcctggtagcatagtccaccccagtttttgtttcttattttagtcttacttgccaggatttgcaacgtttacattttgttctgaaattatgatttccatagcagtttaatctaaattacatattgaaatgcattcagataaccaaacactttatttactatttcttcttctctatttacgagacctatgtttataaatttcagttttcctcctcaagatgtttttctaaaaatgacccaacgacttggaagttttgtagggtatttcaaacttgagaatatctaggacatctttatgtttggatctttctttgcctcagaacattagtcattgttgcacagtcttcctttattctcctgtagaaaaaaatctgaatccatcccaatttccctccttgaaggggtcttactttttcttcgatgcctgagacttcattttttatccttacattttagttatataattgatatgttttaatgctgattgtcctgttccattgttcctctgggttctatcgttagaacattttcttcttttttctactccccttgggaagtctcttttacacccacaacttaaatcaccatccatctcttgatgactttcctgcctaaatgtcacccctaaactccagacccaaacatttgtctagcagacacataacttttaaaagactttaatataacataaggacaaatccccaatcaggcttatgagagtcttcaataaccttatcctcctctatctgagccagaaacaccactaagaactgttggtttccggtgacactaactcaatctggcttcagcaagaaagggaatacattggtttacataaaagaacacctcacagggagggctgtctctaggccaacttgattcagggctcatttgataaactctccttcagttttcattgggttgcgtcagttctcagactcttcctactggcccctggtagagtcagatttacatgacaactctcagatctacttctctaataactcaaactcaccttcctgaatagaatcttgctgacccttgtaggtttgatatggatcatgtgcccttcttagccagtctctggataatgtgttcatgccagccagtgaatgatgaactcattgacttaacccatgtgacataatgcattcccagacaacaaggactgattgtggagaaagagtaggtccctaaaggaaagccaagccagttactggaagaaaggagaaaggatgttatagatacaaataccattaaaaaaacactcttccacaggtatcagctgtgaccagtgttcccctcccttaccatctacatctcattaaacattcagacttcttgtttgtttcaaaacctcttgaatatgtgtatttctccacatagctactactgtccacctggtgtcagtcagtgcttctcctaatgtctatgatgaaacagcggattttttccctaatctatcacagactcatatttttcaaaaatcttatagtaatatatatattcaaaaggatgcctcctttgtcaaaatgctataacaattggtaaatgctgactctcaatgtctatatttatctggcatgcaacacttggtgtcaactgctataggccaccgtcatctgtctcacacacagacccgtacagtagtgtccacccatcaggtggacctcctcttcttccagttccgatgctgctccaaaagaggagcgagcatttttaaatgaaaatctagtcattttatcttccaacctgaatatctttaagtagcatcacatttttctcataatctattcctctctccttagcgtgacttttggtttgtcttctcaagcttcatctctcttatatgttcttttttttctatgtgctcctttgttttttctcacaatctctttccactcttgctctcctcaggggctctgtctttaccttgaacatacacagactccactatacttccttgctaaatgtcaatgctctgcttagcttgttcctcctggaagacttacctgataccacagtcctctcaactaaatcactgactcaagggtttttgtggtatcctgtgcttaaccaccctgtcctaattcttctaatcctattttgtaaattgcttatttagttgtcagtatgtatgctttcactagatcaaaggatcttgggaggtaaggccagatcttgttcatcattatatctctgcccctaacactatgactaataccttactttcaccagttactgtggagatttggtcaattaatgggtccatctgaggaaatgtaaagagggaactcaagccagaccagactgttcatgcaacacaattctatacccaatacctagactatacctacatatatgccctcttctgggccttcccaggccccaaccccatcaccctactttaccagttccactctaatttaagtcttagcaaacacctgtaatgccttgaagccagaaagtgaagtcctccactgcgttgtcaaggccaccaggagaagtggatagaaaattagtcccatgttcttcaaaatataacaacaaactcacttatccaaacaaataatagtgattaaggggtattatgctattactgcaaaaggaccaacagtttagaactgggaaggctgtgtactataagcaaaaaaacatggactttggagcctcatcgaaatgaattaaaagtggacactacaacttaatggcaagcctagtatttaactcagttttcacacatctaaaatgcaaataataccttctttatagagcttttgggacattaaataaaaaaaatctgtacagtgcctagcacatggttggtgctcattaaatgttagttattctcttttttctttttcaagtataccaagatttaacaaagatttgatatacctttattacacggaaaaaaaagcttccgtgatttcaaacaactatcttacagatgggattttttagaatatagcacatttattaggaggttagtccctgattccttgcatattttaataacatgaccatttcaaaattcaacattatgaaattgtagaaccaaattgaatagatttgcacaatccccctctcttcctgccctgtctcccaagcagattttatctgtgacagaattacccactaatgatgataagcatggcagcaatggctaattgcttcctaggagatttagattcagagaagcatgagtcacctcaccccagattctgcaggttcagataagcgatagtatcttgagcatcaaagtaagcaatgaaagggcttgaccagcttttagttgatccctagctataatcctaaataattaaaactagctttctagttcccccagagtttgcatttatttccaagaaatgccacaccactttcttggttacatgtctgtttttattgctcattagaatggtattgctctaggcttgctcacacaaacatttggcgaggagatgatggaataaaaacaaagcagcaagctttaccaggaaataacctatttttatttgcagatattcaaactaaaaaatattcttcagaaacttctggggaaaaaatgagcaagattaaatatgctcaagcgttgccagaagaaacatgtcaataaaaataattatttttagagtgtagagtgagaaaaaaacctttaaaatttaagcaatgaacttagaattttacagatggttttatatgcttgtgtgtgagtgtggacatagcaagttaaaggagtaaaacagacattataattgatatggtttggatttgtgtccctaccccaatctcatgtccaattgtaatccccagtgttggaggtgaagcctgatgggaggttattagatcatggggggtggtttctcatggtttaacaccatccgccttgatgttgtcctggcgagagtgagttatggcaagatctggttgtttaaaagtgtgtagcacctcccactcctttatcttccccctgctctggccatgtaagatgttcctgcttccctttcgcctttcaccatattggaaagtttcctgaggtctctccagccatgcttcctgtacagcctgcagaactgtgagccaattaaacctctattatttatcagttacccattctcaggtatttctttatagcagtgcgagaacagactaacagtaatcaatgagttatctgcccgtttttgaaaaagtaattaagatgaagaaaaaacgtatagcagaattctgatacaaaatgcagtcctgctagcattgtgtcagcattacttgcacatctttagcttgaacttttgtaataaattaacaaatgaatattatgttatttatttagtaaatttcataagtaatgttcttctgtatgttttccagcatactaaaaattgcaaagaatgcagacatgcataacattatagtaaatggtccaaacaacaggacattaattgactaagtgggtgcagtgtgtttctatgaccaccaatataaaatggaaatatttttagataaagataatggactattataacttaaaatgactttgttgtctgtttcaccatgaaataccttataatgagatgacgtgtttatctatagtgagtatgtttgctttttttaagggtataaattaacaatcttttaaacaagttctaagaggcaagtttgcaatctcagaataactgatcagcaaaagagatgaatattttactatttttcttcagcatatactaggtgcagactccaggtgtagaaaatgtgtgtcccacagtctcatggaagaaacccactacagagattacacaaagctgatagtcgaaagaacagacagaccctttggatctcatgcaaggctttaataaaggcaaagaaaatgttatggtatacaaaagaatacacaaaaacatgaggaatctgagatgcttcaaggcacagctctctagggtcctttgttagtcacacagaagccatctctagattatgaaccaacagcatatgggggaggaattgtggtttcagaagactttgttcttaccctggccaaggattaatgctagatttccacacattccagagatatccatatagctggcttactatctcacacacattggcaccttgacttatactaaggagcatccttgggaaggatgaagaaagatttcctaaagagccagtagaaattatcttagtgtttcaggtgaggtggccattataatcagaggtaacagtatactcagcatcccagagacataccagaacttgacactaaattagaaagtttaccggttcagtgtagctggagtgtatgtaagtaaaatagataaagaattaacacaacactacttcagttgcatttctgggtgacagacttgaacctgagataggggataatgaggtactgggtcagagatacctcttagttctagatgttgaattttagattctatagaacatctgggttagaaatatccaagaaataattaaaaagcccaaaatatagagcatagtctttttgtgatcattcaataaacactaaacaattaaaagatgaattttaagagctctaacaattcctgtcagaatcagttataaataggaaaataaaccaaaaaatgttttaaaatgtttcatgctgtgcacttatgttagaacaaattattgttttcaagtttcactatcctcaaaggaaaagatgttctctcaattaagaaaggcatcaaatgttctatagcactgtaggatgactataaataaaaataatatattatgtagtttcaaatagctagaaggaggatattgaatgttcccaacacaaagaaatgaaaagtgtttgacatgatggatatgcaaattaccctgatctgatcactatattcaaagcatcactatgtactccatgaatatgtacaattattatttgtaaattaaataatatttttctaaagaaataaacttacacaagatcaggtgaaatctggctttacgtggagaaggagtttgcagtgggaatttcattatgacttgtttataccatgtggagtcaaattagacattctcttcctttttttccagtttctcttttatccaaggattttaatcaatgtctgaagttagaatttattgaaattaaattcataaatgtatgtgctgtgtgtgtatacatattatatatatacatatacaaatgcacatatatgtgtgtgtatatatatatatatatatatatatatatatatatgaactctgcatttactgtatcttacagactggggagtaaatggtaacaacttttaaatctagctgtcttcatgttgacaaagcatctttcacataagcaattctcttgaaacctgagaaaagaaaagcctggatttttttttctgaatactaagcaaattcctttcaaatacttaatagcaaagatcatcattattatattgtgcatccacctcatcctgcctcatggtaaaatgtctaaaaagtcatcacaaacatgaaaaactcatctcctgaaaactacagaaattacatatgtcatttagagtagtggcctctatacctttgcaaagtgtcatgtctctgctaaatattactaccttacatatatttatgcttttacattccagggaagtagtcagaacttattacatgttataattggaatacaacctccaagtgcataaattacttgtataaggtcacaccatgtaaaaagtaaaacctggtcttctatgcaggtaatgttcttttcaaatcttaaattatttgaaatgtaatgtttttcttttttactctgtcttctctagtttcagaaatataagagtagaggaatatatagtctacctatttacatatgttaaaacatatacaggtagtatttttattattatgatacaactctttttttggattttacattaaatcaaccttctgcattgaagtatatatgaaagagaaagctgttttcgggaatgattggctcttaatccacagaatgctgctacctgataccctattaccacgtgcttttaaaaaaatatatatttagttcttttctgcactatcctaatacagacaatcattttagcaactaagacatatgtgtccttggccagattaagagctacttcaatactttgtgtcatatgtcacagagcaacattctcattgaatatgcagaattaatcttatttgagtttatttaggatgaatcagtgtgtcttatactggtgtgcttgttaaaaatacagattttctgtccactcatttagatttggtaggtctagaatgagcctgaaaacctgcattttgacacaatgtacgtgagaaacactgggaaatataaggttactttctttctgttggaagatgcaaatagcaaaataagggacacagataaagcctgtattgatcaataatgtctaccttgttccctaccaatctttataggaagctaatgataagccacaaattgagtggctttagtttcaattttctctgctcctgcacaccagctgtggcagtgttaataagcatcaaaattgctcaaaggtgatgatttaggagagtaaaaagaaaattgtaggatgttaataatcttttgtactggtgacacctagataaataaatcttttgggaacaagggtcttataatacagttgactatgctaaaataagtaccagttttccaatgaaatagaaatgcctctcttaagctgttcttgaacatgtttgcgtagtacagacatcaccatcaagattttttgaatgtccatctatgattaacaaaacttggagtcaaaattatatagtttgtcctaatagtcctctgcctttcttcactggctcttgatactccctcaatggggcccctggtcttttccaaattctcttcccttaattcgtatcttctaaccagccatgttctatcaaattgggtaaaggttagagattgatcattagtctgtgctgacttatcaactctattagtactttagcagcaagtacaatcctgctagcactgttaactgcttaaaatttgtcaggcatgtattctgtctttatgttcatgacagttctatgagatagatactgtagttataatgaccctatatgtacttacctatgttggttactattatggctcccattttatggatagtaacattgaagtttataaaaattacaaacttatatgttttggctctgtatcctcacccaaatctcttgtgaaattatagtccccacgtatcaagggagggacccggtgggaggtgattggatcatgggggcagtttcccccatgctgttctcatgatagtgagttctcatgagatctgatggcttaaaagtgtgacactttcctctctctctcgttctttctcctgcctccatgtaagacttgcctggccccaccttttgccttctgccatgattgtaagtatcctgaggccttcccatcacgtggaactgtgagtgggttaaacctcttttctttataaattactcagtctcagatagttctttatagcagtggaaaaaatggactaatacacatactttgccagaagttacagtttgttattagcgtagtgttcaagtacagatggcatgattttagagtatgagcttctaatcactatagcatgccaccaggtatgagacctctaagacctttgtttcaatgtaagtagaaatgcctcttgttaaagatgtttccgcgtcttagagtaggttgaaaaattgtcaagaagagtaaagggattgatgactcttggtcctgctgagatataagccatatagaactacacagcgtcttagaaaaaggatgcccctgtgtctcaccccttggtatgctcctgctgttctgatgagtagtttctagcaatttattcctgaaagttgccaaaacagaaaagaataagtgtcctgttgtcactgccttcttccaaaacatatcagccaggcaggctgtctcccctcctctcccagtctgattttcccaaacttgaacactttttgtgtttttacctctgtcgcaccaggattttcagagccatatttttaatttttttaatgccttaactgataaactattttttcaaaaatatatttgttaatgatttgtactgacttcatagacatcacatagtcatgctttattagaattatagtagataggtatatccctagcggtgtaagaggcaattgaggaggaaggataatagtaggatggaatagatgtttataaaactggtaagaagagggacagaaagggagagagctgcatctgatatccatggaaggtggttttcccataggcagtaagttgtcctgatttactctatggctggtgaagcaattcttaaggaaatattatctacattttagaacacttattgtctaacttatcaggattcattcttgagcctggatttagttttaataaagatactatttcatgtttattattagtgctataagaatattatagagtaaattattcattttccctctaaagtaatgtctataatttatgtagtaatacccacttctggatattaactatattactaaaaggttaaaattgtcttcttttagtctataaacctatggattgatatttcctgagacctcctatttctgtttttcttaaatgagatatatttgaaaacaggtcccacaatgtgtgacacagagtaggtgactaatatatgttagaaatcatctccttctttatattttctacactataaaattgtgcagtaatttaatttaatctctgggtgtttcaattacttaagaagttttcctagaaagtctcttagtcagttagtgctgctataacaaaaacctgagattgggtaagttataaagaacaaaaatttatttctcacaactctggaggctaggaggttgaagatcaagggattggcaggcttaatgtctgataaggatcctgtctttgcttccaagatggcatcttgaactctgtgtgctccaggagggaagagtgctgtgtcctcacatggcagaaaggacagatgggcaataaaaggtctagctagttcctcaagacttcgtatggagtcataaatccatgacctaatcatttcctaaaggtctcacgttttaatactgttgctctggagattacacttcaaaaatctttgagggagtacagtatttaaaccaagcctgttaacctgcagcctatgggccacatgtggcccaacacaaattcttgaactttcttaaaacattatgaggtttttcggcatttttttttagctcatccactatcatttgtgttagtgtattagtccattttcacactgctataaagaactgcttgagactgggtaatttataaagaaagaggtttaattgactcacagttctgtatggatggggagacctcaggaaacttataatcacagcagaaagcgaaggggaagcaagcaccttcttcagaaggtggcaggagagagagagagcaagggggaaactgccaaaccatcagatctcacaagaactcactcactatcatgaaaacaacatggaggaaactgccccccgtgatccatcacctcccaccagatccctccctcgacacatgaagattacaattcgagataagatttgtgtcaggacacagaaccaaaccatattagttagcgtattttatgtgttgcccaagtcaattcttccaatgtggcccagggaggccaaaagattggacacccctgatttaaaccatagcagtctccttttcttgtaaccataactagacatggacatgacttccatggactttgcatgtaataacacacaccaaatcttataaacgatggagagtactattaccttgttaataccatatgaatccctgaactagtaacgctaccatcttttttatcttgataatactgtgtactgaaaaactttagtaacacatatacattaaaattaattcttagaatacctacctgtatcctaactctttggatttaattttaggttaagatatacttagtaaaataaagccttgacaatcctttttaaaatgctgatcttcatctgcccaatactttttttccctgataattaccattccttaattcagtactacagagtatctcaaaagtaatgctaaaaatgatgctttggagagctaaggagcagaaataattcagctgtcactcttctgtacagtagaaggaaatgtcatgacttctaacttccaacattaataacatagagctaggaaagctctaaaaagaatgtattgtctgaaaaataaaactgacacgatgtcatgattcacatattttcaatttggaaaacatgactgtagaaattcattgggacttttaaaagcttggaagtttactggaagtaggaactatactaaggagaaccatttttaaagcagggcttgagttgcctatgtggtgtatatacccctacaatgcatttcaagcctaataattatttcatggttttataaattaaatgttgttataacaattataaagaaagttattttgacaggcaactatgtagatcagaatataaaggcaaaggtagttatttctttatcccattttgacagagagtaataggtatttctccaaagtacttaacaatagcagagaaaatgatggttaacaataattgtgaaactgtttttcatattcatagctattgtaaaaataaaacaaatatccagtgggctatttgaaatttagtgaactatcaaacacttttgttggtgaaatcacatattaatccaattgcaaatcaaagttccatcatatacatgaagctgctttatttttatttcagctaatcaacagtgaatcataagttaactggtttttttgtttgtttgttattttactttatgctgctgttgaataaagtcatagcctactttctgaatgatctctagcaaatttacaagattatatggcttttgactgcaaacctgtttctactcttccattttgctttgttgttttttttttgcttcattttgctaatttgttttatctttctgtattttatgagtagttataagctaccttaaataaatttttggaagtagtggaaaattttttaatcagtgaaattattttttaaaatatttttatttgaggaaggaacccctgggaattcaagatcaatcatcagcaaaataccctttgtcttaaacctctcttctgaaccttattgctgcttcttactctgaataaaaaccaattctttcataaggacactaaatccccagtagcctctgaagtggtatgtgttttccttccacaactatcctgtagcacctgctataacaggtgaattaaatgttctccttttctcttccctaaaattttccagctttgaatttcacattatcaaactatgccacctttcctctctgtattgaaatcatctacaatcccgagtcattccttcactgttttaattttgtaacgcttggttcatagtttgcccccaaataactccatactatgaagcatattataatatacagaatagaatgtacatattataatatacaacagcatattctaatgtatagtattctatataaatatagaatcacacactcttctgaggtactgatttccttgtacaaaaatattctcaaccaaatagacacagcattccaagtccttggtccattcagtgaagatgtgccattctgggctagtaatagaattatcagtgcacagtcctattcatatggaagatcacaaccaagaagttaaatgatttgctgtaaactctttctgtctgttgaactggagataagtaaattaaaggcattgaaataatttatgatatatttattgaatgctgtgccttgaccttcataaactgcatcatttaacaagacaagtttcagactttaaccaatttatagtcactgaacaaacatgcctcagacttacctcttttttacctcatagttgaccaactgcatgaccttattaatgagatcaccacacatctacatagtacagttacactacttaacagatatataattatagtactgtatcaaaatttactttattaaatttaggaaagaagtttctagaagaatatatacaatataattagcacctaataaagttttagtgtgatatttcctgcaaattttaatctataacatttgataagtagtgccctatttatacactccttttgtcttttaattttaactacagtgtcataagcatacttgctaatgtaagtattcattttatgatccctattaaatttaagattttcactaattaaattcctggagttataatgggacattaaaattattgggagaactagcaatgataaatatattttcctactcgtttgcatttatataatttcaaatcagtacataaaagccagaaactaattgattatagttgttttctataatctacctggattatgtagtatggagcaatttaattttagagatactctttggcttttatctataaaatacttttagttctcccacttgaataaatgagacaagtctattaaatactaacttattaaatccttagcactgtgctaaactccattgtctcattaactcaagaaatcctcagaaatatcactactgttattttaaagagcaacaagcttgggatacaaagtagatataacaaaacaattagaaacagcagagccaagattcaaatcttaatctccataattccacagattccccttaaattctacatcactatgtagagtaaagtttgaccttgttattcagtaagtagtcagtccttgaggacaataacaatttacaaaagtaagcgccttaatgtcagtgtttacatgggaatttgtgttttactcatggcttatatgataaattggcaaatttgctatcctgataacaaattgaacattcagtcaatgtggggaagaaccaaccacaacctgaacttctcccagaaagtgtgtttacagcagcaagccaaaagcactttctgtggagtggctaagactgttgagagaagagaaagttactttttctctccctgcatttgccctaggcttttgccagaccatccacccactttgcattctttcctgaaggctcctggcaggatttctataggcgtagattgacagatggggttctagtaactgaggcccctccagctccaatgggatgtcatcaaggactttaaaaaggcctttccccaaactacctgctttataaaatgctatctatcttcaaataaagagttaatcatgattaagtggcagtaactctgagagtctctaggaaaatcccattctagaatttattgggctttatggagtgatgcttcctgggtttgtgcagatgtttccacctgaatattcactaaacgagtgtgtttctggagcaaagagaataccatttgttttctttttttttttttttttttgcttgtggcaagcagtatccataatttctatggacaaacataattttgaaatttgtactaggttagccctgaaatgagatggaataagtatcatgactctaacgctattataatgctatgttcttgcccatacttcacttatttgtgtattttaatagcatgcatcactttgaatgaaaacaatcaaattaatctcagaattgagtcagtatttgtattttatattttgcattattatcaaggaactgaagtggcatgtcacaaaatgcttcaactgaaattacgttaagtggtttactctaatcttcagacatattaataaatgaaactacatagttcattaattaccattcctatgtaacaattagatgcacagttcatatttcaattaataaatggaagtgcacagagtcaaggctcatttcaaataccagttctgtagtctgaaaataccaagcttaaatatttgatatattaatcaaatatatcatgaaaaataggtatagttctttttgagaaagtgatatgctgcaatatagttctgtatatataaagggaagttttttatataatttgggattatagttactaatcaggctattaaatttttataacagttccaataaaatcataaaggtctatgataataccaggattagaaatttaaaagggcagctgaaaaatactcgtagaagttgcccaggaatgtgctaccactgatttttttaaaaggccaaggaaaatcaaatagaatcagcatacagtagggttcgaacaaaacccattaaacattacagtgaagcattacataactttactaaatagcactatttagtgataattgacttcaagtgttgagaaaactaagtcaaattatctttaaaaaacagggatttaaaaagtaaacaaaattaccaaactgaatttagaagtctataataagattggcctaattgtaacaaaagcatgatttgcaatagtggaagcagaatacttcctcacttttacaaaaggggaagagagaattaggctgtttattagctgctaagataaaacaggtgatcacctcatagctgtatctgattgcagactgattaaagtgagatggacccagttgattatacaaagagtactacactcctttcccgtactccacaattgtcaggaccccaccatatttggatgcttgatgttcctgtcttcccgtctgtcatttagtgagccaaagtcaccagcttcccagcagattcctttcagcctactaacagaattatattgactctataaaataataagaaaaaaaatggcccttgtggaaaagaataaaagccacaaacccattattctagcattactttgggatctggaaccaaataatacacacctggacacatcattcgacaccatttgcttttggaagcaaatatttattgagtgcctgctatgtgtcaataggcactttacccacacaattttttttcccacagcccacttgtaagtacaggggacatctatctacattttataaactaataagctgcagttcagtggcattaaaattcatagacctagcaagcagcagagccagaattcaaagcttaagtccacgtgactgtcactctgaaacttatttgcatagttccaccaagccacgtccacagggatctttaacttttctgttcatcactttcttttcaagtatctggaacagtgcctggtacacagtaggtcttcagtaaacagctgtggaataaaagaagctctactctggtgcagagcctgctctccctagtggctctgtaggaggccaccgacattaagcttgtctcaatatgttccagctcagagtgttttttgttattgttgtatgtttattttctttacggttccttgtgttgaatctttaaacctggaaggtaaaacaggatccagccttctttgctttgaccttcatagcacactaatgacagttctgcatacagcaatgctttgcagaaatagaccgtattaatcattgacagaaagtttgttaaaagaaatcaataaatctgcatttcaggagtatcattagcccacactcatttttcactcaaaagaactatgcaccacctatcaagacctgaagagtagatttttctccttttctacaaaaaatgaggacaggagtttgagtaacagactcccttaatatgatcactcattttctatgatattcaaatatgaaaaataagttctgcttgtagcatgggaggaggttttcttaaaaatggcttaagagttcaaagcaaacaataatcacttacagctagaaaactacgctgtggcaataattgtatatttgaaaactttttgttgcagttgatttggtttgttctcaaataatgaggctttgggtagaatggagtgaaagaacctgtaagaaaaataaggcactctggtcattgaagatgtgtgtgtagcctgtggcagcaggtcagaggtttgggtctattttgttcactgatgtatcctcatatctgaaacaggacctgatacatagagtatgcacaataaatatttttgagatggattaggacatagaaatcataacgataatccagtgtctcagagaaatcctgtgaatggtaagccctgaaagatgaggggtgctagagcatttaaagaatcttctctccaaaagggaaaataagagataaatttatctcaagagagctcagagggcacttgaaatatcaggggtttctgcaaataaatatatttagtgttcaggcacataagtacatttgggaagattattttgtgtaagtttaaacatgaagtagaacaatgatcagtatgttgtatagtcaaaagcttaagtaagttccatgaaaattaagaatgaaatatagatgcttattattaccgttgcacaacattgctttttaactaattttgtgatcaaggaaaattaaataattagtaaccatattggcgaggaaaaagatatatttccttttattgataattagattccagcgcacttaaatttaaaaaataatactactagatttaagagaatttggtaagctgaccacatactgggtaaacattccttatatagcaatatattgttataagtagaattgaaaaataatctaacttaccaaaacttataaagcaactaagaatatatttagcatgaaatatactcagcctcactaagaaacagaataaacacttacttaaaagaccctcacaaagagatatattatatgtgtagatatcctaaaaatcccacttgtctcatgttatataaaaatctgattaaattgcaatgagaattgcaaataaattaaattacagtgggagttcagaagaataaatgtttgaaagtaaccaataccagtttgaggaaaaaaaaaaacaacaacaaaaacttgcgtatgtgttggtaaggattgtagctgcttcaagaaccaaaacccaaatcctagtggcttaaaatagggtttttattcttgcttactttgcagttcattgtgggtgggttggttctttttatttgcttgatgtggctgttattatttcatttttatttctaagcataaattcattgaatgttcattctgtgctagtcgctggttgtattttctcatttaattctcacaagaacactgagattttccctattttatgaatgaggaaagcgaggctatgaaaggcagagtgaaacagtggaatcagtattcggaaactcattttatctgactgtaatgtacatggaatattcttttgactgcctttgtttttaaaccgctctcacaatagaaacattatataacataaatctgaactagctaaatggatgtggcatagataagtaatactatcctcagttttcacatctgtaaaataatgcaagttacatgagaatatttccacagcccatgtgttttataatcatgtgattctctagtgagaaatgaattgtgaagcttgcctggctccaaaccccatgcttttggttttctattcaagttgatgcttatttatttttataacacttctgttgatagcaatacagataaatgccctatttactccacctgtctcactcttcagatgtgaaggatgtttgagtgtgggagggactccacaggcaggacaaaaactcgctgcttcttagtgtgaccatgtggtacaaactcggtgggagagcctcctgagcaatgaacacagtttcttgtttatagcaagtagacttgtttggacttaaacatggaaattgtattttaaaacaagagactataaaaataatataccctatatccatgtaaaacatgaacaaatacaatgtaataaataattgttataataaaatgaggaacaaatattaaatataaaatgtggactttttaatactcagtccatattttaaaaattttctatcaaaacttccttgtcctttaaagggataacctttttagagtatttaatttaaaatttaaagtataaccttttgttggtgtatctattttagtttttttcaggattatagttttgattaataagtttaaatccagttgattctgaccctgctttagcaaatgactattatgatgtgctttttaaaaatggctttttctgtattgcttggcaatgggaccataggaagtcagccaaataaaggctataaaattaaattagcttactcctatatagcttatctactaggtacagttgagtagctaacaggcttaaatacttttccttttttttgcacatatggagtcaaattgcctcaaagaaaattagtcccatcatatttgaggctctgcaacattggttacaaagatatatacgcatttttaaaaaataatgagaatattcattgttatgccaccaatatttattaatcttgaagcaatataaaacttttatattataaaaagtaggaattattctcccttaatattttacagtaattctgtagagaacatattatctacataaaattggcatattttgaatttactatacataaaatgtgtattccagacatttttgttataaatgatgtcctttgtatgttaaatactgtcaaatttcatagcagttagacttcgtaactctttagctatttaattgttatttttctgatatttaaaaacagtcctacattattcatagtgattctgaaacatttgaggaaggaaagcagatattctaaatgagtccatatgatgtccaacactgctctctactggcaaagaagcaagttataaaacaactattcagcctttcaagtgaaaaaatcttccattttgaataatatttgataacgagggtagaatcctcaaacttccacacattttgttaaatagaatacagtgaaagaatggaagaaatgaatatagacatcacttgtggaaattagcttaaaagagaagtctttgttttcattttaactatttgaaaaataattataggaattttggaaaatattaaccaaatacgacatatcttactagcattttaagagtcaccaaggtaaatattttgtttacaatagcaagtttgataacatttctatagatttaatttcagcagactgcagcctgtaaaatgctgtcttttgtacatctgcctaaacaataagtattcaaatacattgagtggagagatacatggggtggagtatttatgttgaatataaaattatatctatagtatcagaaacttgttctgtatttatcagagtctttatagaagatttaaaaaagacatttactagtttgtaaaatctgacgaactatatgccatgctgttataactttcattatatagactaataatacacaaaacatttttagatcaatgactacatcttaccttttataatctaatattctaaatttcccatctgtgttttatatcattcttatctgtccattttgcttgggagtcatattcaatgttttaatctcaaagttcaatatatgtagatacaatcacttatacctgcatatttacacaataatgccaaattatatagtaattgatgaggttttgttaggtttgcttaatattgtcattggccgatcacttttattttaatgtaaattgaaaagataatgtgcaatatttttaagaaagccacttcttggctgtgaggtaaaagttgatgcttattttcattgatacattttctggagtgttctcatttttcttagtgaacatatattaatattaaaattaacgtatttattcataaataaacagaaaaaccttgttgcattttccaggcacaagcacacaattgtgcaagacacacacttgtactcatgtaaactctatggcctgatatttcttaaaaaaaaattcaccgtaataaattttgtctatttggatttacagcagggccttgaataacactctttgattcaatgttgttttattccatgttattggttataaggttgatgagaaaaaaaatatcagttcccagacagggctactgtctgtgtggggttttcaggttctccccatatctgcgtgggttttctctgagtactcctgtttcctcccatattccaaaatgcgcaggtttggtaactgatctgtctaaatggtccccttctgagtgtgtgtgtgtgtgtgtgtgtgtgtgtgtgtgtgtgtgtgtgcgccctgccactgggtggcgtcctgtctagggctgtttccagctttgccccgagctatcgggcaaggctcctgccacctgggaccctgagctaaaacaattgagtaaacaattatcttacttgtttctattgatctttcttaaatgtatgtatagctcacatttattttggtgtttaacattggaagtatttcggtctttatttagaagtttgctgatatttttgtgaccagaaatatggtgtaggaacttaactgttgtttatatcggttagcctatggtaaaattggttgtgttatatgtccttcagcttaaagttgcagtttcaaagaacctattgatgctgttaagtgaggacttattgtacagaaaaaataaataaataaataaaaccctgaacactttaagtaagaaaaaaatgcaggaacaaatatcacttgccagacaacacataacttttttcttttgctctttgccaaagtgaaaaataacactgaatctaattgtatgaagcaaaatagtctgaaacattatactccttttttcatcattgctaattttttttgttttctcacatggaggaattaagacataaagttgcaaaacataaaaatgagtatttttacacaattttaaataatgttgaatataccagtgtcccatttttaagagactgtcaatgaaatattcctgtatgcctctttcaggtaaatagcaataaaaaataaaccttttgggattagcttttaatatttgtcaaaattccctttcgatccatctaacttgtcttgtttatcaataattcattcatttttataccttagtagtattccatggtatagatgtaccattgtttaagaatccactcattgcaggacaattagattgtttctgattttgagctattacaaagagagctacaatgaacatccgtgcaggacatttacttgaacattagtattcatttctctgaggtaaatactcaagagtgcagttgctgcatcttatggtaagtccacatttagtttgaaatgaaactgccaaaccattttttttttcagattggctgtaccattttacattcctaccagcagtgacatcttgtaattttatttgctatatctggcaaccgcattcaggagtattaatgtctcacttgcatgattccccctgccatttccttgaacactcatcttattcccctttgcagcattattctcttccatctccctctgaaatatggcagctacctgaggacccaggatgctggcgctcttttcaatctctcagcctttcattgagacctttgtgccaggatctcccgaatccacatgttctcttcagaattcttcttcctcagactccagcactgtatacccaattgttgagtctggtatctctagtgagcacgtcagagtcatgttaaccttaatatgcttgagtgtatgtttcatttcttccttacatcttattaatatgccacctttttagagagaactgatgactctttcttaaatattacccacactctgcccagtccatctgtgtgatcaaaatataatatgtgtgtctgtgatctagacataaaatagacatagatacacatacacacttacacacacagacacacacacacacacacacacacacactcatgaggataaaatccatgaatacagggacatttttacctgatcgctacccagcacttagtaaatgctagactgatagtaaatactcaaaaatattttaaggaataaatgagcatatgttaaattaacaggttatcttctgggggcttaatttcatttttattttatcaaataatctatgtccatttaaaatagtcaaatatttctccaaaatttataatgaaaaaattaaaaaacaaaaccttctctagcccttctcctaagcctcactcactgaagcaactgcattttgctttcctgtcttttgttattttattctattctggataaagtgttgtactgctgtgcttttattcgtcatatctgtagtggccatcaacaccctcctgacatatctgccctgtttcctgggctcattactccctctgttttattttagttccttcttttcttactgagaactgggacatggcaggcaattttttgagcctctgcacatctcagtatgaatttttctttcctcatagcctggaaacttggttcaaaattatcatttccctcagaatttgaagttactttcttccattattgctgatgtgaagaagtctgatgtcattcatatttctgggttttgtttttgttttattttttgttgtttgtttctctctggaatcttttgtgattttttttcaatctctagtgctttgatggtaagcctctttgtgcttgtatatttgttttcactcattaatataacattgagtcccttaatctgaaaatttatacctttggttctgggaaagtgattgatagtgttctatcctttagtttttcctcttctctatttctaggactctatttggtttaatgttggctctcctaaaacaggttctcacctttaggcatgcatcagaatcacctgtagaagatattaaatctgattgctgggcctcactcccagtttctgattgagtagaatttgtatttatgacaatttcctagttatggtagttgatgctacaagtccttggaccaaatttcgaaaaacactattctagaccaattcttcaattgttctagttcgtatcttattttaaatatctggcttttgcactctctgtttcctttccttggcctgcatttccccaaatatctacctttctgattgttttacatttcaccttatctgtgacatctcctctgaacatcctatttaaaatggtatgacacagaaagcagacacagtcacatactctgacttccaccagttctaagtagcatataattcacttattcttattaatattgtttggctcacccactaggatgtaagttccataagggcagggaaatttgttttttcagtgcatttaataaaacattatttttttttaattaacagataatattgtatgtttttattctgtatgttttgaagtatatatgcattgtggaatggttaaatctagctaattaacaaatgtattacctctctgctgtattcttaactcctaaaatacaacctgaaaaattgtaagcatttaataattacttcttataattttttctaactttattttttaatattatcattttttaattacctgagtcatatttttaaatttctgtcaattctcttttgttctttatgtgctactttttctagcatcctggttttattatgaatgcaatatatctatattgactgtagagtattagccatcattttttttattgcgctccctctacttttctaaccattccttttgttgctgttttttttcccccagtcttttcatgtgagaggcttttctcgaatatattcacatacttgctgtgttttgatatttaagatcgactcactcaaaagccaactggcggttctgtggacttgagcagggcttgtcatctgctgactgatcaggtgacccatctatttcacatggaaacgttaactgtcagcataggttgtcttgttttcctcggtctgttttcctcagggaaaaattcttctgcttggaggcttataagattagcagctagtatcctgggagccaggctgagaaaagagtctaggggaactttcaatcctgcatgtggacttctgcttagtatctttgtcagttaggtgcctcacttctgctcccagccatgcttactagcattttgcagcccagaggtccccggcctaattcttcagatagttaacaactcttctgttgggatagggtgaattaattccctggtcacggcatgattccttttttttgtttcaccctccaggaaccaggcagagtggaaaagataaaaatcaaagtttgtatactttgtacaagccttttgatggcacttaggacagttatttatgggtttatatactagactgtatgtccctggaatgtaagcatttaagcctttaaccagtgtcttaggccagtttctcccagaaataaatcccaaggcaaaagatttaagtgcatatgatttattaagggggtgctcccagaagaaatcagtaaatgagtagaaaaagcagagccgacaagaagaaaaaatgaaggaagagtagacatcagctggagccacagcattagcctaattccatggtaagctctgcatcataacattataccttagcgtttacctcacctccaaacaaataagctgggcttttgtacctccacaaaacttgtggagttacaaaacttgacttggctgactttccttagccaagtcagtcgttggctaaggaatgtgatgatggggtggtgtgggtatgggagggatgaaaagaaactcccatatgcttctagctctcaatactggcaaggtgactttgacttcattgcccaaaaggaatactctggaggtcttgagtgtgagtcattaccagcaaagcatgtggaaactggaagatgggtctctgagttgataaagtggatcccaggagaactgagcaggcaccagttgtgtccactaaaccctagtatcttcccctaacaatcatttgataagggaatggcaatccctcataaacaacttgtagtttaaagaggttttctttttttcatctcttactgcaatttctctttagaatgatttttcaggagagaagaacagcatttattatctctatctttcaaaagagtcagacaaggcagaaattaggggactttcctaacattctcagattctaaatctcgagcttgttctaacatgctacctcatatctaagagttttataagtattttagataggtgtaagaaatgcacataaatatgaattatttaatctatatatcatgattttttgtaattaaaaaaatacaggaagtataaggcataaactttttttagttttagcatgattgtcctataggttttctaacattacataagaaaaagttgggttaagtagagtgctccatattaagatatattttaatttaatacccaccatcactcaaggcttctcccagtgttgcattacacaaaggatttaattaaagctaatgtgaaataaacatgttaaaaggtttcctggagcacagctagaggttgattcatttcaaatatacttggagttcttccatatttttcccctatggccttatttgcatataatacttttgactcatgacattcctgctgaagtttgaatattcctccagaaatactgccagtaaaacttatagtctattactgatagaccagacccttccttcttctagttcaataattacttccccataaaggatccatctttgcttctctgctcctgctaatcctagaccatccactaatcgcagtgatatgataaattcagagaagttgagaactgtttaccccagggatgtattcagaactaaatagtttctattatgttaaatcctcttcagttacttgaactcttcttcctttctggatgatctgaaacagtgcttttcaaacctggtggcacattaatatcgcttagggagctttaaaatatatagatggcctgactctgacccaggctagtcaaatcagacttgcaggcaatagtaataagattatagcttccaatatgattctttctctttttttttaaattgagacagggcctcactgtgttgctcaggctgccctcaaactcctgagctcaggcagatctcttgcctcaaactcctgagtagctgaaactacaggttgcatattaaagcaccatatcgtaaccactgcacctggctaaaacgcccctatgattctgtcattcaatcaagtttgaaaacactcatcccaaactggagaaatgtgacagctccattggtgtcaggaatagatttggctgtcttccaatcttgatagcaggatttcatttctttttctgcttaaaatttctcattcactttggtcttttatgtatgcctggtcaaccaacaactggaggtcacagtgaggcaaactgaaagcctgttcatatcttatctagggcctcttaacaatttggtatatttcaagcatattaaaaaaggaactattggccgggcgtggtggcccacacctgtaatcccagcactttgcggggctgaggtgggtggatcacgaggtcaggagatcaagaccaccgtggccaacatggtgaaactctgtctttactaaaaatacaaaaattacatgggcgtggtggcgcgttcctgtaatcccagctgaggctgaggcagaagaatcgcttgaaccaaggggttgaaagttgcagtgagccgaggttgcaccactgcactccagcctggaaacacagcgagactccatctaaaaaaaaaaaaaaaaaaaaagtaactgttgtcccttacagaatctgaaaagtgaaacttctctttgcctcagtgcaactgagctttactctctagcctccatttgttcatcagaaagggaacaccagttgttgcctgtattttcaactcatctttgtacctaccttccactatcctcatggcctgttaactgtttctaactctgttctttagactttggtacaaggagtcacttgcaatgcttccagaaatataattcgcttgccctacctctaaagattctgatttatttgaccaaggaacatgtatttttacattttaaccaacgctctaggtaattttcatgccagttgtgcagcgaacccattttgaaaatcaaaactctaatttccttagtgattatttttttcaagaatgaaggaaggaataagagatagcatgactttactgtattttcccttctattctgtaagttaatacatgaaaaagattccacttatggaatttttgatgtagtttacaaacacgtattctcctatgtctatacataggagaagtgattaattcgtgaatctctttggtcttataattggtggtatgtcacaagagcaaaaaaaaatctttggaaaattacatatatttcatgaatttaatgtttgtttgccctatatatagaattttttctagaataaaacctgtatatttcaattctaattggtattgaacatttagtgatactagacttctgtttaggaggtattatatctttccaaggtagagattttattgcagtgtgataattattatgaaacttttttcactttttggattggtcaggttttacttaaacacacttactgtattagtctgttctcatactgctaataaagacatacccaagactgggtaatttataaaggaaagaggtttaattgactcacagttccacggggctggggagacctcagcaaacttaaaatcatggcagaagatgaaggaagagcaaagtcatgtcttacatggcagcaggcaagagagcttgtgtaagggaataccccttcataaaaccatcagatctcatgagacttactatcatgagaccggcatgggaaagacccactcttgtgactcaattacctcccaccagtttcctcccataacacatgggaattacaggagctacaattcaagatgagatttgggtgaggacacagtcaaaccatatcacttactgactaccttcaggtttatttaaaacagtaaaattggccgggtgtggtggctcatgcctgtaatcccagtactttgggaggtggaagcaggcggatcacgaggtcaggagatcgagaccatcctggctaacacggtgaaaccccatctctactaaaaatacaaaaaatgagccaggcacagtggcgggtgcctgtagtcccagctactcgggaggctgaggcaggagaatggcgtgaacccgggaggcagagcttgcagtgagccgagatagcgccactgcactctggcctgggcgaaagagtgagactccgtctcaaaaacaaaaccaaactaaaacaaaaccaaaaaacagtacaattgtagatcatgtatgttttatttctttaactatagctttacttagttgtatatcttggctattaaaagaagcttgtattttaaattctacatgttagatgagtctcataagtggaaaacaaagaaaaatgtttacttgaaaaaaaaagctaatggcgaaatctttggcatcagcaggcagaggcaagtggggagagacgtgagaaaaaaaagaaattgtaaactttgaaatttactattgatgttaaatatagtaacaaaatacaattacatgctttgaatgaaaaataatttttaattactaataagtttactaaattttaactgttgagatcaacattattcccttgggcctaataaaataactttagttttctttccagtaaaaatctacaagtaaaatatttagaaaacaagtatgtttttaaaaataatctttgattaacaggaagtataaatgataaagtttagttacattttcatataatataaaaataatataaaataataattctatttaattaacatatgagtttgcattactattaaaccattctattatgcaatcttatatttcaacatgatgcaatgatatatgatatggtaaaagcctgtgtctcacaaatgaccattttcagtttcttggcagtacagaagtggaacagccaaaaggaacagaagttgtgagagatgctgtaaggaaactaaaggtagggaaaggccttcaaataaattacaagtgtattgactctgtcatgttttcagcagattgatggagatcaaagcatgaacagctttgctgcaggtatagcttcaccctattaaaaatgaactattgaacaaatgtaatcatatcaaggaaacatttttaataacaaacatgtacacaaaattgtgtttaaaatatggcatactgttcacatttttctaaggtataatgtgtcatattaaaaataatattttatggcagtgtgtcttgaatatttgttttgtagcttgcctttactttgcttggataatgtgaacctatgtcccaaatcaaaagctagtaatggcataacaactgtctttaaaagctaagatataatatccaccagttaaaaatgtggagtcagagttgattccagccagaattttgcagtgacactgtatgttaaagatttcctaatctacaggtccaacaggatctggcaatgtccgtaagtagccatggggaaactggtgagactaagagaggagagaaggacatttaataagcaaccccacatatcctagtcaacaagtttcctgagaaaatcttacataagatgctacacaccatgtttttctaattgttccgcatctcgaaggacattgttgtcactgagcttttgaaatttacaaaactccttcaacagaattctcagctttatcatataagaaaatacacattatcactactttttttttttacacagttaaatgttattctctatagttgctctcgtatttttggagaaacaacccttctctaactttatttggtttagggaccatccggttattctaaaggagggttagacctctgagtgtgccaggcaaagtcagagacattaaatggtattactttgctttgagaatatcatatctggtggaatccactctgtgtttaaattgagaaataattgaattggcatgacttctattctgggtaaagaaataaaggtcaataatattttatccatcttattttatatgagaatattttactaatcgttttaagtaaatatgctaaaatctccgaagataatatcactcccatttgggaaaaaagtggattagccaactatttatttccaccattcattaggtaataattcagatttgccttttattggccactagttttaatcattccaaaagaggatttaaaagggctcacagtttatggacacattagaataggattctatttaaatgcttttaaaatgttgaggattctgggcatgaatccaacttcactacaatcagaatgttttatgaaagaacaatgttatttacacatagtatttctttatgcctaggaggttgtttattcagtcaacccaaatcaaaaaccaaaaaaaattcaattgaataatgaatagatcaaatgtaaagatatatttgaaatcaaatgctttctaaacaatgacgagtttacatatattttgcaggattttgtatgtatttctatggagtttcatgtttagaaatgtactctgttaataaaagaatgtgacctacaataaggtaaaaaattaggtagtatagtttaaaaatgcacacttattttatagtagctgttttttctcaaatgtcttccaaaagggagtgtatttaataagcaattttactgtgctgattgcaaacattttgtatatcaggaaagtatatctaagggtaatgattcatacactaatgataatgaataaaacaatgctttttatctatttttatatatatatattttttttttgctttttttgtgtgtcaagggtcagaagctacaattcaaagtatactaagaatattttttaaatgtcaagcctggcgctactggctcgcaatggccagtaggtggtggtgtggctctactaaaaaaaaagagaaaaaagaaccttgctctttgatcatacttacacatctccattttaatttcctgcttatttttctttaacatatgaattctgactacttttaaaaaaatctatataattcagtatgtgaatttatttgccatgtaaggtaacattttatttatatttactcctttttcagcaatattaatgtaatggcttctgatattaaaaaagaatttaaaatttaagaataaaagctgatggaaaaattaaagaattctcaacaatgaatttttcatgcttctgtgtttaatgatgcctgcttagttttcaaaaaaatttaaaactgacttttttacactctttctatcattttttagagaatttacagtttataaatttttcctttataaatataattatttttataagtattaaccttttaaggttcagatactatatttatcaaaacatgttctttatttcctaatcatgttcagcagtttctatttcttaatcatgttttagctgggcttggtggcacacacctgtaatcccagctacttgggaggctgaggcaggagaatcacttgaacctgggaagcaggggttgcagtgagccgcgatcgcgccattgcactccagcctgggcaacaagagggaaacttcatctcaaaaaacaaaaaaacaaaaacaacaacaaataaaacaaattttctaaaatgtagtaattttaaaccctttcaacttctatgtattgaatagcattgttattggaacgaattttatttttaatagtgatttatatatattttattaatacaactagtacagatgttgggggctgaatgtatttcatacacaatttgtgatgtttacatgtaagtaagtattgatatatagattaaaagcttatcaatttccctgggagatacccagtgggcagcattcctggaacccagttttagactgaagatcccctcactgcagtacaactaaattaaagttacacgaaattactgcaagaaaatgtagccgttgggaattgctgtcaagtcttgtgaagtctcagcctagtagattttccatttgaactcactctttctgtgttgtataacactattttgtcttcacaatcagttacctaattaataaaacatttagagcttaatttaattatatataaacatcgctcatttcccgcaggattattagaaatactttaaattaaaaatataaacatgagaaccccagagaagaatagcttcaaataataggcccgaagtagtaaattaattttattgcctaacactctatattccattagtagtttacttaatttcactttttaaaaagtcctctgagaaatggatagaaattatataataagattgaaactcagttgtgctccctttaaattttctttaacagttctatttatcagtagtatatatttaaccaaatactttatttcaagtactactccatccttccccatcattttatgatgacaaaggcttggttatatttgtttgttgcatccagtcattctccaaaatgcttatgcatcacttcctttgaatactttttattggattattatattcagggtttaatggcagatcactgtatccatctagatctaccaagaaataaatccactgaagcaaaaattgaaagaaatttacaaaaaaagactcttcaagcattaacattaaagtagtaaatagggagaaaatagaatataatgttatgtagattgatcaacatatcttcctaagattaattagaaatattaggaaggcaagaggtctgtaagtaggaaaagggacttagaggggagcatgcaaactatagaatacagttagcttaagttttaggaaaaaaaagaaaggcaggaaggagaatattaaactgaataaaatatagattgaatgaatataaccttaggcatgagagttgtgtaacatatgttcaaaaatcaaggccaataaccagtgtaaaccttgatatgcatgaaggtagaactgggaattttcttttctaaatgcagaaaatatattgtataaaagaaaaaattatttggtgaatatctgcaaaactaattactaggcctaattcctaaaaacccactttatgaccatggtacatagcttatctgggacttactgttcttatctttgaaataagaagcttagattgcatgaacctgaagctgttttgagcacaattaattcatcctgttatgaagaagagagaaaagtttcagaaaacctagattagagatgttgtgcttatttttatttttctttatctcattctgtccttcttccctctcttcctttcttcctccccactcccttcttacctctccactttgtttttctacctcagcccctacttccttcctttctttaattcttccattctttcttcccttctcaatagataagtttaataatagtggttgttttgttgtagatgtttcagggggaaaaaatttaaaaggttgcacagttcttgtcagaggtcacaggaatgcttgagtctggatgtggaaggggcttcagaagtcatgctcagtctgttcctggaaaacagcagcacctaggaaaccagctgagaatgcttctgcagctgataatgagagttgctttatccagacgcattcacatagggggagagcagctgacttattttgtaagccttcctatatgaaaaccttcaaattgcttaattatgctgatataaggagattatgaagggaaaataaacaaaattaattcatattatttgggagagagctgggataatttttaaagatctacactcaagcaaaataaatttattaaaggcaaaaaagaaaattatctggcacgaattagttgtatcgtgcagcagtaagactgctggatacaaaaaatagcaacctaagttcgtagagcaagacagacagcaagctgaaaaattataccacccaaaatggaataaaacaaatggtaccccctgggataggaaggcagacacttaaaggcattcatatatgcattaattatattattatgtgtggcagtgcaaagccatgaaaagagagaaagacttttaatcactctgtgctccaggacggagctataccatgtgtattcacatctgccctaaattacagtgaaatacacagtgcaagtaactgtgacatacaagaggactagaacgctgtcttgcattacatgtcatcaattttgagtcaggttgggatgatctatatccctagagagaaaaagttactctagaaaataactttttgaagccctagaagaggggcaagaaattctttcttctaatagttttctttccatttcttaaaaagaaaaagttggatgctggggtgattgcagaggagagaaggaatgtagggagagagtaaaattgccaattaaaatcaagatgcccagtaaactttgacaaatattttttagtacaaatatgttccaaatattgcatgggctaacgtgtatactaaatactatatatatgttgtgtttgtgcctatattttaaaattaaagttttaaaaagaatattaattgtttaatactcaagtttagctgggctcctgaaattttcccccactaaattaagcaatgctaggagagaggcagagactccatctgctaagcacatgagtattctggttttctttttgattttataacagaatcgaacaagcatttacatacacctactaactcaatgagaaagtataataaatactactatgaaagtattgaaaaaaaaaactgtgctttcaagatactcactatatttgtagttctagactgagtctagttctatacctgagtctttcagctgggataattacttcaattcttagcttcagtttggaaatggtaatctgcttctttttatttattgatgtggttggatagaatagtgttccaaactaggtaagtatctaaaaatggcaaagagggcatattcaacagctgatgaactgcaaattctctgaagataataacaacaaaagattcacagaaaaacaaactgatctctacatatcttcccacaaagtattttgagttttctcaactgtctggtatgaatacgtttttgtaaataccatgaaagaagtgcattaaaaatcttaatttaaaaaacttgctgaaaatcaatgtgaattataatggctgattgctatgatttttaaatatattgagactatctttataaaatgctttatacttggcaaaaattcacttaattaaagtctgaaattgaatatgaactccaaatgtatatttatttttgttcattctttatagaaatagaagtgtagctttgtgaataatttttcattcgtagtttgcaagacatatcaagaaatctgaaggccagaaaattcctaaagtggagttgcaaatatcaatttatggagtaaaaattctagaacccaaaacaaaggtaaggctttttttttaatgttagaggcaatctttaattaattgcaattatattcctactttaacaaatatttaaaattttttgccaccctgaactgtttagttctgagttaatgacagttcgaaactctaggagttttagaagtgaaaacaacttttggaattgcattataagtgatcttttcttcagcttgtttgggatataatattaataacttatgttaagtgcattcaacagtgtttggacgtgtatttgggaatgtttttttcatgagatgtgaaagagatgcatacagtgtggttcactgagtatgaaagaagataaaagctgtgtgttattaaaatattctgcattgacttttatttcctgtagatgtaatcagtgtgtattagttttttacggaggctgaaacaaaacaccacaaactgggtggcttaaacagcagaaaatattttctcacagttgtggaggctggagttccaagatcaagatgccagcagggttagtttcctctgtagcctttctccttggcttacagagggctgccctcttgctgccttttcacacttgtctggtgtctcttcttataaggacactcatcaaattggattaggaaccatactcatggccttattttaacttagttacctttttaaaggccttatctcctgtttgaagaaaaactagacaaattaaatttagcagagtttatttgaacagataatgattcatgaatcaggcagcacttgaaaccagatgttcagaaaggtttgcccagcagcgtgaacatggagctttttataggctgaacacagactcaaaggtgacaactcacctgattggctatagcaaggcatataccttatatggatatgtagtgatgagctggctgcctgtaattggctgaaacttagctatgtgttatacttccaaattagtgttcagtttatttacatactagttaggttgcagtttgttgtataggaactcaaaatacacagacaaccctaggtgaatggcctcatgcttatttaatttagcactccaaccacagtctcattctgaggtgctggggattagagcttcaacatgtgaattttggggaacacaattcagcccataatacagtgtaaacttaagtttcttgtatttaggacccttcaaagcaaataaaatatttaaaaataaaatctgttctggattcaaattcattaacatatacttgttttggactaaagtgtttccttccaaaattcctgtgttcatgccctaacccctaatatgactatatttgaagataaggccttcaaagaggtaacttaggttaaatgagattttaagggtggggcctcatccaatatgtctagtattcttacaaaaagaggaagagacaccagggatacgtacactcagagtaaggaccacgtgaaggcagcaatctgcaagccaaagagagaggccccagagaaaccaaacctaccgacaccttgatcttagacttctaacctgcagaactgtgagaaaataaattcctgttggataagccacccagtcagtggtattttgttatggcaggcttagtaaacaaacacagtactttattcacaatgcctcagagttatcatttagtaattttgataagaccatattagtcaatttggaaaaattaatatttaactccaattattttataaatacgtatcgtcaaagtgttcttctaacaccataggatacatattgacaaattaattcagtataaaagccaaaagaggaacttctggcctgttaacagattatgaaaaatgtttcccacaggtctgcaacttttctctagtccagcaagtgtctttgataccttcatctatgtaaattccagttcccagcaacaacttgctatttaaagtgtggcctgcagaccaccagcaactgcatctattggatgcttgttagaaatgttgaatttaatgccccactacagacctacagaatctgtatttgcaattaaagaagaaacctagtgtttcgcatgcacattaaagtttgaggggatctgctgttgtgcatggtttagtggcttaatgcggtaggcctcattttcaaattgtagcttatggaatagcgacataaaaattaactgaggcatttgcaaaagtaatttctaaggccccaaatttgcccccagaatcagaacctctaactgtggaaatctgtagtaaagatcaatggcataccttcaacttcccatattaaagagcaatggcattcctttaaacttttcaagacgtgaatttaagtcctctcaacaattatcctgtctaatcttctctattattcaccctcaatattcaattacaaacaaagatgtgaagatttactttagttacggcgattctaaaataactactgctaaggtggctgaaaacagaaaaatgaaatggtgaaaagatagtagagggttgattcaagcatataatgggatatatgtagtttgctgggaaacaaggcaattgaaagcaaggtatgaatgagataaattcattaggcaattagcagttacataaagaacaatagaccaaggaagcaataaattacagaaggacaatgcaatcaaaagtgtagcaacaaagtgtagtcttatgtgtcatgaaaataagaataatcctattcctacatcttcttttcaaaattaaaaggatatagagtggtaaatgtccagccggaatagggtatttgtaggccatgcttatgttgaaagtttttttctacaccatatgaattaggtagctgttttggagtgtgtgtacatgtttgtgtgtgtatgtgtaattaatattattttcaatttcttatctgaaggtttggggcttgtcccagcacacattaaaatatataaagctgataatatactttatgtatcattttcgtatgttcttgttattttttatttgaaacgacctatggtatattctaaactctaataatttcactacgttcatataccataatttaccaaattattcttctattattgaacatatggaatgtttcaaattttttgttagttgataatcacgtttaaatatttacaaaatacaaacacaattaaatgcagtatgtagagaaaacttttttgggttttagaattcacaggttaataatggcatgtccttagaaatgcataaaatgctaattgcttaaagcgctacaagatggctaccactaactaccgctacaagatggctaccacctacgtttatagggtatgtgtgtgtgtaaagagagacgaaaatggatcatgtaatgcaaatgtggcatgatgttaccagttggctaggtgaagagtatatgggtatgcattgcaaccttttctattattttctgcatgatttcatctgaccttttaaatgagactatttgttccaatgaaagatatgtgaactggctgggtgcagtggctcatgcctgtaatcccagcactttgggaggccgagatgggggaatcatgaggtcagcagtttgagaccagcctggccaacatgatgaaaccctgtctctactaaaaaaaaaaaaaaaaaagtagctgggtgtggtggtgggtgcctgtaatcccagccactcaggaggctgaggcaggagaatcgcttgaacccggtaggtggaggttgcagtgagccaagatcgcgccactgcactccagcacaggtgacagtgtgagactgtctcacataaaaaagaaaagaaagaaagatatgtgaaaagctcttttaaagacttaatcaacaagttaggctatcatatctgtttggtttttcttccttggcttcctgaccacttgaagaagaaacctacctttatgaaacccaattgaccaataacttatgatttattaggttattccttatacctgctctcctgattgttggttatttacctggaataaggataattttttttcattaactttaaatatttgtaaatacaaagacagaaataccaaactttttttaaaaaatagcgtatgatactgtagagtgaggaaaaaccaaagtgaatagggtcaaaaattaagctgggcttagaaaaagtctgtggtacagcaacagtagagaatagagaacccaaaattaaagctgcacacctacagccatctgattttttgacaaagtcaacaaaaataacagatggggaaatgattattcaataattggtgctgggatacctggctagccatatggaagagattgaaactggacccttacctttcaccatatacaagaatttactcaagatggatcaaatatttaaatgtaagaccttaaagtataagaatcctggaagaaaacctaggaaacaccattccggacattgcccttgggaaagaattgatgactaagtcctcaaaagcaattgcaacaaaaacaaaagttgacaagtgggacctaattaaattaaagagcctctgcacagcaaaagaaactatgaacagggtaaacagacacctacagaatgggataaagtatttgcaaactatgcatttaacaaacatctaatatccggaatctataaggaacttaaacaattgaacaagcaaaaaataataataacccgattaaaaagtgggaaaaagaaacaggaacaggcccttctcaaaagaaaacaaacaagtggctatcaaacatgaaaaaaatgctccgcatcactaatcaaagaaattaaaatcaaaaccacaatgagatacaatcaccaccatgcagaataactgttattaaaaagttcaaaaataacagatgctggtgagattgtgaagaaaagagaatgcttatacactgttggtgggaatgtaaattcgttcagctgctgtggagagcagttggagatttctcaaataacttcaaacagttaccattttccagcaaccctaatgctggttgtatatacttggtatatatccaaaagaaaaataaatctttataccagaaagacatacactctcattttcatcgcagcacttttcacaatagcaaaaacatggaatcaacctagatgcctctcaatggtggattggataaagaaaatgtggtacacatacatcattggaacactatgcaaccatagtaaagaatgaaattgtgtccttttgcagcaacatggatgcatctggaggtcattatcctaaatgatttaatgcagaaacagaaaaccatataccatatattcttacttataagtgggtacttatactgggtactcatggacataatgatgcaacagtagtttctgggggctaccagagggagaaggaaggaggggataagggtttaaaaacaaactcttgcatactatgcttagtacctcagtgatgggactatttttacccaaaacctcagcatcatgcagtataccctggtaacaaacctgaacatgcaccccctgaatctaaaataaaagtttaaaaaagtctgtttggtgataaaacaaaacaaaacaaaacaaacagggaaaggtagtaagaaagtagatgattcccacctactatttttattgcggaaaatcatattttcaggtttctatcaataagtttatcacatgacaacctattatataattctgtttcttaagcttttaatatcaaatctgcatgcttctcccaacctaaacctcctttacaaaatatcagtgaagtggggttcaactcaacatgattagccagttgacttcattatcctatattgccttaccaaaatcaataatgccagtgcttttctttcctgtccacaagtctcgatttcctattattaagactttaatatttaataataaattgttattaataattaatattcaattagtgtttaatattaaattggtaatatttaattatttaatattaaagtaattatttaatgtttaaattaatagtaaattactagttaatattaaaaattaatttctattttttctgttatttatttctactcgttctgtttttaataatttcaactttcattttagattcaagagttacatgtgcagatttgttacctgggtatattgcatcatgctgaggtttggcatatgaatgattccatcacccagatagtgagcacagtacccaatagttagtttttcaatccttaacacccccttttcccatccactttaaaagttacccagtgtctattattgccatcattatgtccacgagtacccaatgtttttcacttataagtgagaatatgcagtatttgtttttctgtttctgcattaattcgtttaggataatggcctccagcagtatccattttctggaaaggacatgattttgttctttttgtggctgcatggtattctgtggtacatatgtaccacattttctttatccaatctaccgttaatgggcacctcggttaattacatgtcattgccattatgaatagtgctgcaatgaacatatgagtgcatgtgtctttttggtagaaagatttgtctttttatggatatatgtcaagtatgtatacccagtaacagggttgctggaaaacagcaactgttttaagttccttgggaaatctccaaacttctctccatagtggctgaactaaattacattcccaccaatagtgtataagcattccctttttttcatatcctcaccagcatctgttgtttttgactttttaataagagtgattctgattggtgtgagatcatatctctttgtggtttttatttgaatttctttgatgataagtgatgtggagcatttttttcatgtttatttgcagcttgtttgtcttctttagagaagtgtctgttcatgtcttttgcccactttttaatatggttatttgttttttgttggtttaattgtttaagtttcttatagaacctgggtattagacgtttgttggatgcatagtttgcaaatattttctcccattctgtaaggtgtctgtttactctgtttgatagtttcttttgctgtgcagatgctctttaattaggttccacttgtctacttttgtttttgttgcaattgctttttggaacttagacaaaaattctttaccaaagctgatgtcaagaagggcatttacattattttcttctaggatttttatagtttgaggtactacattatttaatccatcttgagttaatttctgtatatggtaaaaggtaggggtccagtttcattcttctgcatctggctagctaggtatcccagcaacatttattgaatagggagtcctttccccattgtttatttttgttgactttgtcaaagatcagatggctgtagacttgtggctttatttctgaattctctattctttgccattggtctatgtacctgtttttgtaccagtaccatgcttttttggttactatagccttatagtacagtcatcgggtaatgtgatgcctccagatttattcttttggttaaaattgctctggctattcaggcccttttttggtttcatatgcagtttagaattttaaaaattctaattccctgaaaaatggcattggccatttgataggagtaacattgaatctgtattgtttgggcaatatggtcattttaacagtattaattcttccaattcatgagcacggaatatttttccatttgtttctgtcatctttgatttttttccacagtgttttgtagttcttcttgcagaaatctttcacctccttggttagatgtattactaggtattttattttttttgttgactattggaaataggattgcattattgatttgtctctcagctttaatgttattggtatacagaaatgctactgatttctgtacattgattttatatctcgaaactttactgaagttgtttactatcagttgcaggagcctcttggtggaatctttaggatcttctaggtagataatcatattgtcagttaagagggatagtttgacttattatttttttattttgaagccttctctttttttctactgtctgattcctctggcaaggactttgagtactctgtggaataggagtgatgagagtgggcatccttgtcttgttccagttctcaaggggaatgttccagcttttgccggttcagtattatgttggctctgggttggtcatagatggctgtactattctgaagtatgttccttcaatgcctagtttgtacagggattttatcatgaaggaatgctggattttttcgaaggctttttcgacttctgttgatatgatcatatggtttttgttcttaattctgtttttatgttgaattgtatttattgattcgcatacgttgaacaaaccttgcatcccaggaatgaagccttcttggttgttttgaattaattttttaatgtactgtggaattcagtttgcaagtattctgttgagaatttttgcatctatgtacatctggaatattggcctatagttttcttttttcactgtatctttgcaatgttttggtatctgaattatgctggttttgtcgaatgagttagagagaggttccttctcctcagttttttgggaatggttacagtggaattggtaccaactcttctttgtaggtatagtagaacttggctgtgaatccatctgctctggggctttgtttggttggtagattttttattactgattcaatttcagaacttgatattgttctgttcaggatttcagtttcttgctgattcaatgttgggaggttctgcgtttctataaatttatcaatttcctctagattttctagtttgtgagcttcaaggtgttcgtaatagtctctgaggatcttttgtatttccgtgggatcagttgtaataccacctttgttgtttctcattgtactttttggctcttctctcctttagtctttgtttatgtagctagtggtctagtgatcttgttgatccttccaaagaactaacttttgggtttgttcattgtttttatggatttttttctctcaatttcattcaattccactcagattttagttatatcttctgctagctttggggttagttgatatttgttcttctagttcctctaggtgtgatattagattgctaactagtgatctttctaaatttctgaggtatgcatttagcactaatagctaatttttaagagccctacttgaattctattcccagaagtgagtttttaaaactcttaatgaaaaagaagcatctctattttaatccctaccaaacctggggagcaatcttggagtttaaaaatccttgagatattttatacattcaattatattgcatattaatatagaacaactatttaccctatgttacatacgaatatagagtatatgactatttacccatatatataaagtaccatttcttgaatgcattaaaaatgtaggaaatctaaaaaagggattaaaaagctctgctgagcaccagtgtccccaaaacattcctaagaatgctgattgcggtatgtgtgtgtgagtgtgtgtgtgagtgtgtgtgtgtgtgtgtgtgtgtgtagtgagagagagagacagttctcagttcttggatacaacctattcatagacatttacagacatgcatttagaaactactattcaaggacatatacataagtgacacacaaaaaaatcaatcatttcattctagatgtatgttgatatttagaaaaaaacaaatgtgatacttctaaaataaatttatttatagttaaacatacatatatgagacaggatttttaaatatattattaatctaacatggactgtctttatacagaatagaatctttatttttttttcacttggatgaatgaaaatggaaagtgaaaattaagtgaaagcaatctcaataacaattggctcctctgtctttctgtgtcctttccctttctgcttttctcacgtgtcctccaaatgaagattatagagtgctagaaatgagagtaaatgagagactatgtagatttcagcaccagctaagtgaatgttgtgttttgcatgttactcataatttctcccatctatggagaaatgaatttttttcctatagtgtttagcagtaatattttctctttatttatcattaacatgcttttacaattaataagctgttatagacctcctgtcagtatttgggagctatcgtgtaacagagagctgttatttaattgactatattgtcattaaaacaaaaaaaaatcaataagaaaggaaactgttctaataggcaaaatacagaaagaagatagtctcaaacaaatatgatcattgtccatcgatgctttctgtataagaaaggaaagatgctgccatcaaaagctaagtaagtcaagcacctcttcttagacttggttccccctgcttttaaacagatgaattaggctatctaataatgccagtaagcattacaatcctacaatatacttccttattttaattttcatacttaccaagcaactcttcgatggcttaccgtttggtttaccattgtatgcagggaaagaatgctttgctatggacagttctcttagcatttatttgtatatctcattttatatattcattttcagtctgacgagcagttatttgaatcagagtaatagagcaaatctcagcaagctgacacatcaaactctgaactgagaagtttaaatgttttcatatcaatgattcttatcttgaacaaaatctctgagattttgattcaactgaggtaaaaacagtgtaaatttttatagcaagcaccccaggtatttgtgctacacgttgtctgaagccacctttagagaaactcttctagttataacctaaaataaagcttttttgggggatattcagccagccttccttagatgaaactgtagttgcttccatctccaatcttataaaacacccactcaataatcttggtgaactgactttctgattgatatttctagtgttacagtgtatcttaggaaaatatatttatgactacaacagaaaaaggaatagttgatttttctacttgtcataatcaaaaacattgaatttcttttctacctccaacatgtttcagaagactgtgaagaatgaataattaacacggatgatctatatgaatataaaaagtgtcaaatgctccatcttttgactaaataatagtaattatagaaacacatttattttatataaatatttttattttaatgatgtatataccttctattttataagttttataatttaatatgtgtgtgtgtgtgtgtgcgtgtgtaaatatatgctgcaactatatcgatctggttgcagtatttgtcttctactgatgaatagatttgactgcgtgatttggagtctggatatgtataccattcatttattgcttcatgaaaaatgctacagaagttccaaagatgagcttcctagacagaacaggttcaagagtgtatgagttaccatgaaattatataaaataaaatttaataagattactaaggatgaaatgatagtgtgtttcacatgaaatcgtatccagataaagctgtgttctaaactataatgctagtaaacagcagtgagataaaatgagaattgctctggtttaaaagagttctggtaattctgtaaaactgtgggggtgtcttattctttctgggtctcattgttctcctctgtaaacatgcaaagtttaaagtatatgatttctcaagagccattgtagctcagataggccataaatctttgatcattttgtactatgcttatgttttgctcagcactactgaaatgcatatcttagtttcatcctgaatcaggaggtctatctgtatccattatgcctttgttttaggttggggtgtacataattataaaatcaaagattgacagatgattgttctacttttaaagtcacatgttattaacacaaacgagtatttcagaaaatgaaaaaagaatcccatcaactatgtttatttccatctgtgttcacaggaagttcaacacaattgccagcttcatagaatatctttttgtgcagatgataaaactgacaagaggatattcactttcatatgcaaagattctgagtcaaataaacatttgtgctatgtatttgacagcgaaaagtgtgtaagtatcccagatgttgtagggtggtttgttctgttttataagccaggaattgtcttgcttctggcattggcaaagtatttgaaaatgaataattttctgtaaattattctgtaaaaagtctgtaaatacttagctgtactaatagatttattttgtcatgagaatatgcttcaggatttcatctgtaactaaattctcatggtcatgagcataaacttacatgtaaatttcttttattagaatgccatgcctgcttatgttatgcatgtattttataataatttaatctattttacaattttaaactcaaatatgatttagtattatgcacataatacaaacagtagtggtgagcaaacgtgtgtttcccccacatgtgcagaatatgatggattttatgaaaataaatattcttaactccaggaaatatgatctatatggttccttaaaagattttccaatacactgaaaatttagttccttatgttcattgtataaaaatcttaggccaggcgcggtggctcacgcctgtaatcccagcacttcgggaggccgaggcgggcagatcatgaggtgaagagatcgagaccatcctgaccaaaatggtgaaactctgtctctactaaaaatacaaaaattagctgggtgtggtggtgtgtgccagtggtcccagctactagggaggctgaggcaggaaatcacttgaacctgggaggcagaggttgcagtgagccaagatcgcgccactgaattccagcctggcggcagagtgagactccatctcaagagaaaaaaaaaaaacaacttaaaataatgaaagttaatggaattgtatgtatgaaattctatgttaaatcctgtagcagttctttaatcatctggaatcttaaggaaaacccactggtggctgcaataaaggaaaaacatgtaacctcaacaattttattggtttagataggaaataaaacaattcatctgtttgctaatttttgctgctgtcaaaaataacagatagctaatattattatcactgttatgtcatttgtttatctagtttcagtattgagcttcttgagaacaaatacctttttatttgttcatgtgactcctacatcaagtggacaataggtgctcaatgaaacattccttaagaaaaagatcacattgaaaagttacaaaaaatagagcaagtttttatttttattttttaaactgtagttctctagaaaggaaagctaatgtgctaagctactagatatcataataccttttgtgaattttgtgcacattatggaacatttcatcagaaaaaagatgcttagcaatataagacaatattttgtgcacaataagacattttatatagctcaaattgattttgaattttattttatatgaacttctgatgaatgaataaataaaatttacatatttcaagtgttttttaaccatgattgcttgcagattcttttctctatgactgagaagattaaagttgatatttgttgaatatcttctacacataatttataataaccttttaccacctacataaagcagtaaactcagttattcttctttcctgccttacccatagaaataaatttccttaaggtcctttgaaatgtttcagagtcagagttcattctaaatattggccttcttatagatttgtgccatttgttttatattctttgatccctatccaaatttgttaaattaatatttaaaatataagtttgccaccttaaaagcatagaccccatttctttttgatcataactgtctgtaattgattgttctccttggatatagcgtatcaactattttctcttgttgtgcgcatgtaccctaaaacttaaagtataattaaaaaaataaataaaaaaagattgaaaataatttcttgaagcctaagcagtggttcacaatcattaatgtacataaaaatcatacaggatgccttttaaaagctattatcaattggggctggagctcaggaaatctatatttatcaagtataccaagtgattctgctgcaggtagaggaagtcttggctttgagaagttcccagatacctcccaactataagttggcatcaccttcctgtgctgaaaaaggacgtttcctcaaaattttgttatacctgcactatcttaactatgaggttttatcagtgctaattataatgatgactatatttataacactgatattatatgtatgcagaatttttgatatgccatcttatgtaattctcattttaaatagtttagcatagagtgttaaaatgggaaataagttatggcctatctcatacaactctcctcctattttaaaaaaccaagaccagagatgttgaagtaagtttcccaaagttacaaagctaagtagtcagtagaatcaggactaaaatctaagactcataattcttattgctacatttatctcatcatgctatattactcccataactgtggcctcctctagagttcatctgctcttattggggactttatctgttcattgtattttatctttttagtacttctttgaaattgagattttgaaagatgaaaccttttttagtaaggcacaagactggaattcactactttattaacagtatcatgttgtattaatagtcctccttcttccatggtgacagtgaggaccattcaaccctgccaaattagaatgctgaatgacaacatttaaccctgccaaattagaatgctgagcttctatacttaccaggcaataagggggcagtgcatttccaccctcactctcctactggaattgcatctgatgaagccacctaaagcagaaaatttaaataatttccagtatttcataaaatgaaaatcactcttcataccaagagacaggtttcttaaactaaaaaggaaatgacagtcagtagttaccaacacatagatgtcagagatattataattataggacaaaggttttagaacagccatcatataacacaataaaatgagcagttacaaacacacatgaaacagatgagaatgtagaaaatcttatcaaacagaaaatctaagcaaagaaacagaagatatagcattaggagatatacctaatgctaaatgacgagttaatgggtgcagcacaacaatatggcacatgtatacatatgtaacaaacgtgcatgttgtgcataagtaccctaaaacttaaagtattattataataataataataatactaaaagaatactgaaaaataaagtaatgacatgaaagacttagtgtatggactcaacagcagaatagagaggtcaaaggaaaagaatcaatgacctggaagactgacaaatagaaaatacccaatctgaacaagacaaagattatagactcaataaaccaacaaaacagaacctcatggactgtgggaccgtaacaaaatatctaacatttgtgtgtcatctgagtcctggaaaaagagaataagcacccttaaaaaacactccaagaatattagttgaaaactttcccgatttgacaaaggacatcaacctatagatctaaaatactgagtgatctccaaacaggattaatccaagtaactccataccaagacacatcatattcaagcttctgaaaactaaagacaaaagaaaaatcttgaaagcagcatgagataagcaagtacttacctatagcagagaatgtgaatggcagtgtatttctcaccagaaaccatgaaggcaagaaggaagttgcataatactttttgagtaatggaaaaaacaaaagcctgtcaaatgatcctatatccagaaacatattcttcagaaattggaaagaaattttaaaaaattattagatgaatgaaaattaagattgtttgccactactagatatcctaaatgaatggctaaaggaagttctctaaatggaaaggaaacaatacaaaatgggaacttggagtataaggaaggaaaaaaaaaacaagatgagcaaacatatgagtaaatctttagttttctaaattgtgtttgatagtagaagaaaaaatactttctgatgtgattttaaatctgatgtgatttcatatatggacatgaaatatgtaagccaattatattaaactaggaaagttaagaggatgtaaaaagggaggtgaggtttctacacctcacatgaactggaaaaataatagcgctgggtaactatgataagttatatagataaaatgtgaatccaataacaaccattaacacgttgtataatgagatacacttaaaagcactatagagaaattaaaatgttatcgttttaaaagcccatagagatgcaatgaaaagaaaacagagaaagaaaaaagataggtaacagaaaagaaaaagattaaataatgtacttaagccctaacatatcaaaaatcacattaaatgtaaatggtctaactacaccagttaaaatatgttgttaaggtggattacaaaacataatccagatacatatcatctacaagatgttcattgcaaacataatggtataggtgatataggcaggctaaaaatgaaagaatgaaaagagagttttcatgcaaccattattcagagaaagcagtagtaactatatttacatcagataaagtagacctcaaggcaaagaaaattaccagagacagaggaggggcatatagtgataaaagggaccagttcccaagaagatatggtaatcctaactgtgtattaccaaaaaatagagctgcaaaatgagaaacaaaaacagatagaactaaaagagtaaatagacaaatacgcaattatagtcgaaattttactggcactttccctcaaatttatagaataattagaaaatcatcaaggatatagaattactcaacatcatcaaccagtgggatctaatgagcagttacagagaacctcacccaacaacaacagaatgtacattattttcaagtgtttgaggaagatgtaccaaattaagtcacatcctggaccataaaataaatcttgaaaatttaaaagaattaaaattatttaacgtttctctgactataaggaaatcaatctaaagatcagtaacagaaagccagaaaatctttaaaagctaggaaatgaaacatcatattcataaatattccatacattaaatagcgattcacaaatgaatttttaattttgcgaattgaataaaaatgaagtagagcgtatcaacatttgtgtgatataactaaagcagtgctaagaaagaaatctgtaactaatttaatacattaggaaagaggaaagtctcaaatgaataatctatgttcccatctcaaatacacagaacaacaaaaatatcaaaataaacctcaaagtaagcagacggaagataagattaataagagaagaaattggtgaagtggaaaatacagaaaatcaatgaagcaaagacctgattctttaaaagattataaaagtcacaaattgtattaatttggcaaagaacaaaagagggagaagacacaagttaccaatatttagaatgaaaaccaacagatttcactacagactctctgaatatcaaaagaataagaggatcctataaagaactttacacacacaaattcaaaaatacaaataaattggatcaattatttaggaacaatattaccacaaatcactcattattaaatagattattttaatagcctgataactataaaggaaattaaatttataaattaaaagttattaaaagataaatctccaggtgtagatggtttcactggagaattctataaaatgtttaaacaggaattaatgctattctatacaatccattccagtgaaaaataagagggacagaaacactttctacttcattttgtgaaactagtatttctctgataccaaaaccagacttagacaatgaaaaaaaaaaaaacactagagatctgaattcctcaggaacataaatgtaaaaattcctaaggaaatataacccagtaatgcattatattagtcagggttctctagatggatagagctaatatatatattggaagtttattaaggagtattaaactcacacaatcacaaggtcccacaataggcccatctgcaagctgaggagcaaggaagccagtcatagtcccaaagctgaaaaacttgaagtccaatcttcaagggcaggaagcatccagcacaggagaaagatgtaggctgggaggttaagccagtctagccttttcatgtttttctgcctgctttatattctggctgcaccagcagctgattaaatggtgcccatccagattaaaggtgggtctgccttttccagcccactgactcaaatgttaatctcctttggcaacaccctcacagacacacacaggatcaatactttgcatccttcaatccaataaagttgacgctcagtaataaccatcacatgcattaaaagaattatatgcaaaggttaagagtagtttgtcccaaggatgcacattttgctcaacattcaaaaatccaatgatataatcaaccacatggaaaatctaaagaagaaacgtgataataccagtcagtgctttaaaaataactttaaaagagaatgaacacacactcattgtttaaaactctcagaaaaataggaatggaaagaacttcctcaatttgataaagagcatctaagcaaaatacagatattttactttatggtaaaaaaaagtatgctttcctcctaagacatggaactaagcaaaacttttcactctcttggctcatatgaaacacagccatagaagctctagccattgcagcaagacaaaaaagcatataataaatttgcagattgtaaataaagaaataaaactgtgcttatatgcagatggcatgattgtctaagtagaaaattttgagtctaaaacaatttctggatttaataaatgagtttagccaggtggcagaatacataattaacatacatggatcaattgtattgctgtatactagtagtgaacatatggatacagaaatttacaattgctaaaagaagtggaatacataggtataagtctaaactaagaagtgaaatttgtatgctgaaaattcatgtgcaacaaattgctgacaaaagaaatgatagaatctacaaataaatggagagatactattttcagttcttcatactgatgtatagatttaacacaattcctgtcaaaattatagcaaggttgtttgtagatatagacaagacaagattattctaaactttatatggaaaagcagaggaactggaatcactaaaacaatttcaaaaaaagagcagtgaagtgaaagtaattcatctaccctgtttcaagacttattagatacctttactaatgaagactttagttttggtggagggaaagacaataggtcaatggaagagtgaacatataaattaacacacagaaatatgcccagctaatgtttgtcaatgctgcaaaagcagtgcaataggggaaagaaggttttgttttgttttgttttgttttgttttgttttattttgttttcagacagtgctggtgcaattggactttcataggcaaataaaatgcaccttgacctaaacctcacactctatctaaaaattaactgaaaattcatcatggacttagatataaaaatacaactataaaacatttagaaaaaaaacacatgggaaatcttcaggatgtagggctaggaaaagagttcttagaattgacatccatagcaggatttaaaatgggggaaaatgatatactgaacttttgaaaacatttttctatgtataagtgctttgttccatgtcttaggaaagcattctttttttatcataaagtaaaatatctgtattttgtttagatgctccttatcaaattagggatgaaaagacggggagaaagtattagcaaaccacatatcagacaaataactagtaaaaaatcattcaacactcaacaatatgaaaacaatgaaattagaacatgaacaaaagacaacaagatgcatttcattgaagaggatatacagatggaaagtaagcacgtgaaaagatgtcaaacattggtgtccattagggaaatgcaaattaaaatcaaaataagatattactacagaattatcagacaggctacaataaaatcaccaaatgctggtaagaatggggaaaaagtacatcattcacacatagctgatggagatataaaatggtatggccattcaggaaaaacagtttggcagttttataagaaactgaacatgcagctgtcctatgaaatacttggacatttatcccagagaaatcaaaacttaaaatgttcacacaaaaacctatacacaaatatttatagaagcttattcataatagccgaaaactacaatccatccagaaaatgtgtgaagggacattacttagcaataaaaaggcatgaactattagacacacaacaatgtggatgactctccagagattaaggaatgcaaaaagtctatctcaaaagcctgtgtactctatgattccatttctataacattcttaaaatagcaaaattaaggaaatggagaacaattagtgattgccagaggttaaggagatggtgagggcaggctagaagaggatgtgcttataaaacagcaagatgaaggactcttgtcgtaatcaaattattctgtattctgactatattatgaatatcctgattgcaattggtactatagttttgcaatatattatcattagaataacctggacaaaggatacacaagatctctctgtattatttctcacagctgagtgtaaatctaaattatctgaaaataaagtttactttaaatatctgaaaaataaagtatggcctatttggaccaaaccttttgtcttattttaagtaaatgcaggccaaaaagaattagtttctttcctagagtgacaagctagatagaaacagaatttgaacttagaggaaggcttaccttagcatactacaaaactagaacagagaatttattgtgatatggttgatttttattataaattaaatataattgctgtcaactgtttaaccattattttgattttctttatttttcacaatttcatttccaaatgttaataaatataccttatttgctgaatgctgcttttaatataatttaaagagtagccccaataaacaaatgaaattatcacacacacattttttaatgatgtgaaaggaactgtaaaataaggcaaagtttaaaacttcatttttacatcttaattaattctccgtaaaaagggttcattgtcaaaagaatcatacattattagtactagaaggaatcactgcatccagtcgttttacaaggtctgtctgtgagaaggtgtttactgcatattcttattatagccatatttcacgtttgctttgtgttaataatttttgaatcacatttatcaaaataaaaaattaatgttttttttatttcattacatgattgagggagagctaatttcttagattagccatccaacttaatgtaattagtttaaaattagaatctggaagcttattgttgctgagtatttcctgccaataccaattttcatgtctccatttcatgaaatactataatttacatatcaagtccctgagtttaaaaactctgaagaattggcttattatgacaacaagcaggagtgaccagctgtaaactagaaaactaattttttagttaatttgtctgaggttcttttgtatgtgattttttaagacaaactttcttttatttgaacaaatttatggagtagatgtgaaacattgttacatggatataatatgtagtgatcaagtcaaggcatttagggagggcatcacctgagtacaatacatttatattaactatagtcaccttactctactatcaaacattgaatttattccttctctctaactgtatgtttgtacccattaacccacttctcttcatcctcctttccccatttattcttctcaggctctgttatccatctttctactctctacctccatgtgatgaaatactttgctttcacatgtaaataagagcatgcaatatttgtctttttgtgccttatttatttcacttaagataatgacctccagttccatccatgttgctgcaaatgatatgatatcattacttttatggccaaataatatttcattatgcatatatacaccacattttcttcatccatttatccattggcggacatttaggttgattccatatgtttgctattgtgaatagtgctgaaataaacatctcagtgcaggaatccctttgatatattgatttcttttcatttggatggatacccagtagtggagctgctagatcaaatgataagtatatttgcaggtttttttttgaaatcttcatactgttttccgtagtagctttagtagtttacatttccaccaatagtgcataaaagttcctttttctccacatcctcgccaacctctgttatcttttgtctttttgacaatagccattctgactgggttaagatgataacattgtggttttggtttgcattctgtgatgattataatattgagcatgttttaatatacttgctggctgaatgtgtgtcttcctccgggaaatgtctattcatgttctttcccatttttttttaaatgggaacattttttttttctaagttgtttgagttccttgtatattctggaagttagtcctctgtcagatgaataatccgaaaatattttctccaattcaaaagttgtttcttcattctgttgattatttatttttctgtgtagatgctttttagtgtaattaagtaccatttgtccatttttgtttgtgttgccagtacttttgagatcttagtcataaattctctgcctagcccaatgttcagtagttttccttagattttcttttaatatttttacagttccagatattacatttaagtttttaggccactttgagttgatttttatatatggtgataggggtccagtttcattctattcaattcaattttcccagcaccattaattgaagaggatgttctttctccagtgtaacttctttttggctttgtcaaacctcagttgactgtaaataagtggttttatttctgagttctttattctattccattattctgtgtgtctgtttttataccaataccatactgctttggttactgttaccttgtatattttgaagtcgggtaatgtgatgcctccagcttggctctttttgctcagaattgctttaagtttgccgtttcttattctgtgatgaatgatgtcagtattttgataggcattgcattgaatctacaggttgctttggatggtagtcatttaaatgatattatttcttatgatccatgaatataggatatttttctatttgtttgtgtcattgactatttcttttatcagtcaataaatagttctctccttatagagaacttttacctccttggttaaatttattcatatatatatatatttattcctatatatgtatatacatatatgtgtttatctctctctatatatatacgtatatatatgcatgtgtatacttattgcgctattgtaaatgagattgccttcttgctttccttctcagctacatcattggtatacagaaatgctcctgatttttgtacattaattttgaatcctccatcttactaaattcatttatcaaatctaagagtttttttatggagcaattaggtttttctagatataagatcatatcagcaaagagggataatttgacttcctgttttccaatttggatgcttttatttctttcttgtttgattgccctgggtggacttccagtaccgtgttgaataggagtgatgaaggtgggcattcttgtcttgttccagttcgtagaggaaaggctttcaacatttcttccttcagtgtgacattaagtgtggatttgttattttatggtatgtttcttctgtgcctggtttgttgagagattgttatcatgaaggaatgttgaactttatcaaattctttttctgtgtctattgagatgattattttttgtccttcattccattaatttgagttaccacctttactgatttgtatatgttgaaccatccacgcatctctggtataaatcccactcaatcatggtgtattatatttttgtgtgctgttgagttaactagcattttgtggagcattttgtgtctatgttcatcaggaatattgaccagtagttttgtttttgttgttgttgtatccttatctggttttgttatcaaggtgatcttggccttatagaatgagttaagaagaaccctgttcttcaatgttttggaatagtttcaggattggtattagttatttgcatatttggtagaattttattgtgaatccatctagtcccgagcttttctttgttgagacagtttttattactgattcaatattgctactcatattggcctgccaggttttctatttcttcctgattcacttttgttaggttgcatgtttccagaaacttacccatttactctagattgttcagattgttcagtttgtcagcatatagtttttataatagtctttggggatctttgtatttctgtgatcagttgttacatttcctttttcattctgatttagtttatttagatattctctcttcttggttagtctacttaatgatttctcaattttacttatttcaaagaaccaattttttgtttgtttgatcttgtgtatttttttagtctctatttcatttagttctgctctgatcttttttatttattttataatgttaattttgggttggtttgttcttactttcctagttccttaaggtatattgttaagttgttaacatgttatctttctacaggaattttttgatacaggaatttattgctataaacgttcctcttagcactgcttttactgtgtctcacaggttttagtttatgtttccatttgtttcaagaatttttttttatttccatcttaatttctttgtcaacccaaaggtcattcaggagcatgttgtttaattttcatgtatttgtatattttccaaagttcttattagtattgatttatttttattccattgtggtctgaggggatagtagaaattattatcttttttttttttctaatttgttgagacttgttttgtggcctaatatatgggctatactggggaatgttctatgtgctaatgaaaagaatgtatcttctgcagtttttggatagaatattctataaatgtgtattaggtcaatttggtctgtagtacagtttaaatttggaggtttttgttatctgtctagatgatctatctagtactgacaatggggttttgggctcccccactattattgtattgcagtctatctctttagatctagaaatatttactttatggatctttgtgctccaatattgggtgcatatatacttagattttttaaaattgttatatcgtctcactggatatattcctttatcattatataatgaccttttccatctttttagaactgtttttggcttaaagcctattttatctaagtacagctatttctgcttgcttttggttttcatctgtgtagaatatctttttctgtctctttacttttagtctatatgtgcctatactggtaaggtgagtttctagaagggagcatatatttggatcatttaaaaaatcaattcattcatactatatatttatgtagaaaacttaatccatttacagtcagtgttattattgctaggtaaggctttgttcctgtcatattgttaattgttttctggttgttttatatatgactttcttctgttattgttcatctttgttgttttggtagatgtctgtagtggtacactttgagtcttttatctttttcccttgtgttatttctttaccaatgagttttatactttcttgtgttttcctgatagtaaatcttgtccatttgtttccaggtttaagacttccttgaacaattcatataagaccagtctagtggtaacaaattccctcagtatttacttgtctgagaaagactttatttcttcttcatttagaaaggagaatattactggatatcatgttcttctttttttcttttagcactttgaatattttagcccattctcttctagtctgtaaatgcttttgctgagaaattcattgttaggctgatacaatttcctttacaggtgactagacgctttcctcttgctgtttttataattctttatctttgactttagatagtctgagtataatgtgcgatggtgactgccttttcgttttgtatctgcttagggatcattgatctttcagtaagtggatatttatatctcctgctagacttagagagttttcatctaggctgggtgtggtggcttatacctgtaatctcagcactttggaaggccaggaaaggtggataatgaggtcaggagtttgagaccagcctggccaatatgatgaaaccccatctctactgaaaatcaaaaattagccaggcatggtggcacacacctgtaatcccagctacttgggaggctgaggcagaagaattgcttgaacccgggagacagaggttgcagtgagctaagattgcaccactgcagcccatcctgggtgacagagtgagactctgtctcaaaaaaaaaaaagaaaaagaaaaagaaaaaaaaagaaggttttcattgactatttcatgaaatgggttttctaatccttttatgctttcttcacccttgggaacactgataatttgaattttcagtaattttaaggtgtcataaatgtcgtgaaggctttcctcattcttttctactatttttatctttatatttgtccgactgaattatttcaaaagatctgtctttaaagatttgagatatttttttcttccacttgatctagtctattatcgaagatatcattatgttactcctcaatgagtccttaagttctagaatttctctttcgttcttctaaaacatatctatctcttcagtatttttctcattcatatactgatttgtttttctgatttctttttattgtttttcagatttcttttgtatttcactgagcttctttcaaatcagtatcttcaattctttatctgggattttgggaatttcttttttattaagatctactggagatcttaatttactggagaattattatgtttctttcaaggtgtcatatttgtttgatttttttgtttcctgtgtccttatgttgatatctgcacatttgtataaaagtcacttcttcctgtttttgaatttactttttgtggggaggatgttgctaaaccactcattagaaatctactaccacgttgctgggcacggtggctcacgcctgtaatcccagcactttgggaggccgaggcgggtggatcacgaggtcaggagatcgagaccacggtgaaaccccgtctctactaaaaaagacaaaaaattagccatgtgtggtggcgggtgcctgtagtcccagctactcaggaggctgaggcaggagaatggtgtgaacctgggaggcggagcttgcagtgagcctagatcgtgccactgcactccagcctgggtgacagagcaagactctgtctcaaaaaaaaaaaaagaaaagaaatctaccaccatgttccaatcacctaccaccaggctccatctccaacattggagattacagtttgacatgcgatttgataggaacacagatccaaaacatatctttctgcctctggtcccccaaatctcatatccttttcacattgcaaaatacaatcatacctttccagcagtccccaaagtcttaacttgttttggcattaaccccaaagtccaaagtccaaaatctcatctgagacaagggaagtccctttcacttatgagactgcaaaatccaaagcaagttaattaattccaacatacaatgggagtacaagtactgggtaaacattcccattccaaaagggagaaattggccaaaagaaaggagatacaggcctcacacaatcccaaaatccagcagggcagtcattacattttaaagctccaaaagaatcttctttgactccatgtcccatatccagggcacactggtttgagaggtgggctcccaaggtcttgggcaactctgcccctgtggctttgccattaaggttcagccctaatggctactctcacgtgctggcgttaagtgcttgtggcttttcaggcacagggtgcaaactctcagtggatccaccattctggggtctggaaaatggtggcccttttctcacagcttcactaggcagtcccccaatggggagtctgtgtggggtgtctaatgagggctccaatcttgcagcaaggctcgcttcttacattctgtgtatctgcaggcttaacaccatgtggaaactgccaaagcttatgacttgcaccctctgaagcagtgacctgtgctgtacctgggcctctttgagccatagttggaaatggtgtggctgggaagcagggagtagtgttgtgaagctgttcagggcagtggggccatgggcctggcccatgaaaccattcttccctcctaggaagcctgcaatgggagggtatgctgcaaaggtctctgaaattacttcagggcctttcccccattgtcttggctgttagtgcttggctccttttcacttgtgaaaatttctgcagcctgcttgaattcctcccctgaaaatgggctcctcttttctaccacatggccagtgatacggtttggctctgtgtccccacctaaatctcatcttgaattgtactcccataatacccatatgttgtggacggaacccagtgggagatcatttgaatcatgggggcagtttcccccatactattctcatggtagtgaataagtctcatgagatctgatggttttatcaggggtttccgcttttgcatctttctcattttctcttgccactgccacgtaagaagtgcttttcgcctcctgccatgattctgaggcctccacagccatggggaactgtaagtccaattaaacctctttttcttcccagtctcaggtatgtctttatcagcagcatgaaaacagactaatagtgtaaattggtaccagtagagtgcggtgttgctgaaaacatacccaaaaatgtggaagtggctttggaactgggtaacaggcagagggtggaacagtttggagggctcagaagaagacagggaaatgtgggaaagtttaggacttcctggagacttgttgaatggctttgaccaaaagcctgaatgtgatatggacaataaggtccaggttgaggtggtctcagatggagatgaggaacttattgggaactgaagcagaggtaactcttgttatgttttaacaaagagactggcagcattttgctcctgcactagagatttgtggaagtttgaacttgagagagataatttagggtatctggcagaagaaatttctaagcaccaaagcattcaagaagtgacttgggtgctgttaaaggcattcagttttataagggaagcagagcataaaagttcagaaaatgtgcagcctgacaatgtgatagaaaagaaaaacccattttttgaggagaaattcaagagcagctacagaaatttgcataggtaatgaggagccgaatgttaatccccaagacaatggggaaaatgtctccagggcatgtcagaggtcttcacagcagtccctcccatcacaggccccgaggcctaggagaaaatggttttctgggcctggcccagggtccctgtgctgtgtgtaccctagggagttggtgccctgcatcccagttactccagccatggctaaaatgggccagggtagagctcaggctatggtttcagagagtgcaagccccaagccttggcagcatccacgtcgttttggacctccacagaagtcaataattggggtttgagaacctctacctagatttcagaagatgtatggaaactcctggatgcccaggcagaactatgccgcaggggtggggcactcatggagaacctctgctagggcagtgcggaagggaaatgtggggtcagagcccccatacagagtccccactggggcactgcctaggggagctgtgagaagaggcccacttgcttttgattttacaggctcataggcagaagagactagccttgtctcagatgagactttgaactgtggacttttgggttaatgcttaactgagttaaggctttgggggactgttggaaaggcatgattggctttgaaatgtgaggacatgagatttggagaggccaggggtggaatgatatggtttggctctgtgtccccacccaaatctcatcttgaattgcagctcccataattgccacattttgtggaagggacctggtggagataatttaaatcatcagggcggtttcccacatgctgttctcatggtagtgaataagtctcatgagatctgatagttttatcaggggttttcacttttgcatcttcctcattttgtctggtcactgccacgtaagaagtgccttttgcttcctgccgtgattctgaggcctccccagccatgttgaactgtaagtcgtattaaacctctttttcttcccagtcttgggtatgtctttatcagcagcgtgaaagtggactaatacagtgaggctgcaaattttctaaacttttatgctgtactttccctttaaatgtaagttccaaccttaggtaatttctttgcttatgcatatgagtatagcttgttagaagcagccagatgaaaccttgaatgctttgttgcttagaaatttcttcctccagataccctaaatcatcattctcaagttcaaagttccacctagggcaggggcacaatgcagctaagttatttgctaaggcataataaaagtgaccttcctccagttcccaataagttcatcatttatatctcagacctcctcacattggacttcactgtctacatcactattggcattttggtcataaccatttaaccagtctctagcaaattccaaactttccctcattttcccatcttctgagccctttaaagtcttccaacctctgcctgttacccagttccaaagtcacttccacattttcagatagttttatagcaatgccccagtcctcagtaccagttttctgtattagtatgttctcacattgctataaagatatacctaagactgggtaatttataaagagagaagtttaattggttcacaattctacaggctgtacaggaagcatgatgctggcctctacactgcttctgctgatacctcaagaaacacaatcatgacagaaggcaaagcaggtgcagccatggcttacatggcaggagcaggatggagggtaatgaggaggtgctccatacttttaagtgaccagatctcatgagaacctactcactaatttgagaacctactcactattatgagaacagcaccaaacagatggtgctaaaccatttatgagaaattcacccccatgatccaatcacctcccaccaggtcccacctctaatactggagattacaatttaatatgagattttatggggacacaggtccaaaccatatcagctataaacagcattagtgagatctgccatttccttggagggttagtttgcagatattaggggaggttgtggtggatttgtgctggggactgggacgttaagcatgtcactgtttaagccccagtcgtggcaacagtgggctgatcatgcctatctttattccctaggctgatatatgctggcagtggtattggtggttaccagtggaccaattcttgggcttctagttggcttgcttggatgccagtcatgggcacagtggactgagcaggtggacaagttcttggtcccctaagcaggcactgtggtatgggttatggtagtatcagtgacaggaaaattatctgcatcccaggtactgtatgttgatgtgggcagtggctatgatgggctgggtgagccagtcttcaggccctcaggtgccagttaaggtaatagcagccaggagtttagagtttagggccaacctcatgcctctgggaggtgcactcaagtgcccaatgtggtggattgggttgggtaatccacatgatcctgggctaagtcctggggtctgtgctgggcaggcttgtgctcagatctcccagtggtgacagtagtcactagctgtagtgggcaggggcagggcaattctcaggtccctggcagaatgcatgagtgaggggcagtagtagccacgctgaggccccagcattgcagaggttggcgttggccttggtagccacatcttgggctggggagtggggaatgcacatcattctcatggcccagtcctgttgcacttgccttcagccctggcagtggtagtccttgcctaggttgtacctcagcccccgctacaggagcccctactcagcttgtgactaagtttcagtggcaacttgcacccagtcacatcccattctcagtctcagtggcacttgtattctacccggcagctacagccaatgccttgcttgtttctcagccccacccgtgggagcttattcccaggtcatgtcctagtcccagcagcaacagcccaagtttccctaatgcctcagcctcagcacttctgggccccaggacagtgtgcaatctgctcaaggctaggattcaaactggcatcttgctgtagctgcttgggtctcagaaatgatgtgggacctagtgcaagctccctcctgggagcagttctatcacatggtctacgaacagctccatattttagtttcaggagttgggagcattgaggggctgtcccttgaccagggttgcatgattccatgatgcagatgagggctgctggaagtctctcactcacccttttcccatgtatggaaagtcactcctggctcccagctgatctcaaccaaacaggctgcctgtcttcttccttccttgcttttggtgtttcctgtcacttttctgttgaattctggtctttgctcttggattatatattcaaaatgtgattaaagtgccaagatgtatttatgaaatgacattaatttattaaaaaatgaaacaaaatctaacagttttatttggcaaaaaggcaaatctacaattatagttgtacattttaatagttttctcagcaattgacagaacaagtagaaaaaaagtcaataaaagtaccaaaaaaaacccccaaaacccaatatcatccaccactttaatagacgtgaatagaatgctatcccaagcaacagagtatactttccttttgaatgcacatggaatgtttacagaggtatactatatgctgggccataatgggagactcaataagtttcaaaactgaaaatatcacagcatatattgtctaactacaaatatatggaactaaatatttggcccacatatttagagttaaatattttgtacaaatatttagaattaaaacaccctttatataactatagctaaaagaaaagttacaggggaattaaattattctttaactgaagaacagtaaaatacaatgtatcaaaatttgtaaagctgctgagaggcaaattcatagctttcaatctttatgtaagaaaagatagaaaagttaaaattaatcattttagtcctgacataaagttaaatgaaaacaagaaaaacaaatcaaaattaaagtggaaggttaagaaacactacagtagaatcaatgacattgaaattggacaaacaataaagaaaattaacaaggccaaatattggtgcttcattaagaatgaaattagcaatctctaaaaacttcatcaaggacaaaagtgacagaaaacacaaattgccaatactagaaatagtggatgtagctgcagatcctatattctttaaaaggatacaaagataaatattatataactattataccagtaaatttggtaaataatataaattgataaatatcttgaaactcaatttaccaaattgacagaaaagaagtagaaaatctgaatatataaaattacatacaaatatttaatataaattaatttataaatgtaatttatatttatatttttaaaaaattatattttttttatcttttttttatatttttaaaaaagattcggaactaaatatttggcccacatatttggaattaaatatttggcccaaatatttgacaaaactttttgacaagtgaaataccaagctcagatagtttcactattaaaatctgtaaaacatttctttttaaaataccaattatacataaaccttttcagaattaagagaataaagttacagttccaaatcattttatgaagactgtgttaccctgattgaaaacatgacaaagaccttacaaaaaatgaaaattatgttccagtgtttcttatgacatagacttaacactcttttgcaaaataattccaaatcgagtccagcaatatataaaatagatagtacattattaccaggtgaggtttatcccaggaattcaagtttggtttaacataagaaaaatcaatcaacgtaatacaacatcttaacagaataataacacagtagtttcagcaagtacagaaaagccactagacaaaatttaacccattgctgataaaatttatagcatgctaggaatagaagagacattgtttttctgataaaaactttaaaagttctacaggtaacatcataattaatggtaaattattgaatgctttccttctaagactgggaacaatgcaaggatgtccattcttactacctatttaacgtggtattaggtgccttagctagtgaatagatggagaggaagggcacaaggattggaaagaaataggaaaaaattgtcttttttcacatatataatatcaacttttttacataaaaattgctgagatctacaaccactagatttatgaaacaaatttagcaaaaacaaagcttacaaatcaatgtacaaaattaaattgtgtctgtctactagcaaaaagaaagaaagaaaaatgtatttaccgtagcatcaggaaacatgaaataatgagaattttaaaaatatgcaagccctctatactgaaatcttcaaagtattgatgtaagtaaaaaagacctaaaataatgggagaaagataccatgtttatagattggaaggctcagtttaattgtggttaattctaccaaattgatcgatccatggattcaatacaattctgattaaaatcacaatgggattgttagtaaaaactgaaaagttatttctaataaggtaatgtaaattacctagaacaaaaacaaattaattttgagagagaagaccaaaatctgggcaagcatacctgatgtcagaacttaccttaaactcttatcaagtcagggtgatattaatgtaataataataaatgaactgtattgtagagtttagaaatatccatacatacatggttaattttttttcccacaaatgtgacaaaaaattcaatggaaaaaagaaagtctttttgacaaatggttttgaaataactagctaaatatatgggaaaaaattatgaaaattatctcctacttacgctacataaaactatttgaggtggatcatagacataaaagtagaagcttttgtaatcttatacgtaactttcattaaaaaacatagaatgtcattatgaactttggatggatagtgatttcctggaaatgaccccaaaagcactacacatgaacaaaaaaaggatacaatggactttatcaaaaataaaacattttctgttaatctataaacactatcagcaaactgaaaaagcaagtggctatattcccaatacgtgtatctgaaaaaggatctgtatccagactatataaaaaactcctaaaaatcacaaataaaaagacaaaacacctaataaaagtgggcagtagacttctacagggagttagtttattaaagagaacataaaagaggcaatgaacacacgaaactgagcaatattattattcaacagggaaatataaatttaaaacacattactatagcatcactcatccaatatattgtctcaaatgaaaaagactgtcaatatcttgtttctgagaatgtgacataatgagaactctcttaactgctggtggaaatgcaaaattatattattactttggaaaacagttgcacagtttcttataatgttaaacctcccatgatttaacagttacattctagatatttaccaagagacaagaaaacatatgtctacaaaaagatcttagaagaatgtttgtggtagtttcatgtctaataactaagaactgacaaaaccatgaatgtccatccatagtacaatggataaatcacttgtggtatatttgtaacatgaaatgctaatcagcaacaaaaccaatgtgttattgataagtacaacacgtatgaaactcagaaactttaatttagtagaagaatacagacacaaaataatacatattagtctatttttatagatatcaaggacaggcaaaactgatttataatgataaaaattgaagaatcgtcacccataatagatgagatttgactgaaagtaggcataagagacattctggtgggctagaaatattctttatttttaataagttggagattatatatcttatatgattcataaatttatcatgatctgtgcatttcattgtatataaattttaccccccacctccaaaaatgtgatggttggagagtcagaaatctggatttaaattcagtttctccattcactagctttaggcaagttatacaactttacaaaattgcagtttcatcatatgtattgtggggtaataataatccttacttcagagccatgatgagaatcaagtaagataatatatgcagaatatttactagacagctaagtgcctagtaaagatgttattataaaatgagaacatggttttttaaagttattaatataaataaataatatgaggccaaatgtcattaatgaataattaataatgttaccatttaaatgattctttataatgtacaaattgagtatttaaagataacataatgtctcgttaaaaggatacatcgacactttgggaggccaaggcgggtggatcacctgtggtcaggagttcaagaccagcctggctaacgtggtgaaacccagtctctataaaaataaaaaaaattagctgggtgtggtggtgcgtgcctgtagtcccagctactcaggaagctgagacaggagaatctcttgaactcgggagtggaggttgcagtgagctgagattgcgccactgcactccagcctgggtagctgagtgagactccatctcaaaaaaaaaaaaaaaaaaaaaaaaaaggggaaggatacatcgaaatcataatttagaagggaagcaacctataattaaaaatccaaccatctgacaaaggtctaatatccagaatttgcaaggaacttaaacttatttataagaaaaaaacaaccccatcacaaagcgggcaaaggatatgaagagacacttctcaaaagaagacatttatgcagccaagaagcatatgaaaaaaaaactcaacatcactgatcatcagagaaatgcaaatcaaaaccacaatgaggtaccatctcacaccagtcagaagggtgattattaaaaagtcaggaaaaaatagatgctggcaaggctgtggagaaatataaatgtttttacactgttggtggggatgtaaattagttcagttattgtggaagacagtgtggcgattcctcaaggatctagaactagaactaccatttgacccagagatctcattactgggtatatacccaaaggaatacaaatcatgctactataaagacaaatgcacgcgtatgtttattgcagcactatttccaatagcaaagacttggaaccaacccaaatgcccatcaatgatagattggataaagaaaaggtggtacatatatcccatatcccatggaatactctgcagccataaaaaggaatgagataatgtcctttgcagggacatggatgaagctggaagctatcatccttagcaaactaacacaggaacagaaaaccaaacaccacatgttctcacccagaagtgggagttgaacaatgagaacacatggacacagagaggggaacaacacacaccaggacccattagggggtgggaggcgaggggagggaacttagaggatgggtcaataggtgcagcaaaccaccatggcacacgtatactgtataactaacctgcacattctgcacatgtatcccattttgttttggaagaaatttttaaaaagaagaagaaaaacgtctttttattgtaaaataaacagaaacctattacccaaagttttgaaatgagaaacagaaaacaaattattcataatcccacaatctatcaaaaccacttctttaatattacaaataatcttaatatctaacacaaccaattagtttaagtcaatgaacatgcatacattggtatctgtcattttcatttatttggtagtttttattatagctcgttgtttactttcttgtcttttttcttttcttttgtaaaacagtcttcctttaaaatattatgtacatattttgcattttttagttaactaggttaaatactatatttttgtctaaaaccctccttaaataatgaactataaaaattctattaaatgatataagatgattaacaaagcatgttttcattttatgttgatcacagtagataataaattattagaatttgtagtagagttaaagcatagcattttcaatatatattactactagtcttcttgttatctggaggtcttactaaatatgacataattgtgacaacattaaatcttattgatgcctttaccaaaattctttataatgttgattaagtaaataaatctttagtctttactatgtgcaagacattatgaattcagtggagatatgaatggagaagaaatgagcttgtggatgtaagatatatttgtggcagtttcaaatcaatagatctgagattgtaagttgtttacaagcccaaattcagatgacatatatattttgatcactggcactgtgttttaccaaaatacaaactgtttaccatcgcttaaaattgggagctctcatataaaatttcagacttctggcctcatctttcatacataagatctgacagtttcagattggaattgctcacttccaccaggcaacaattaactgggacagagtagcaggtgttccatttagagggcatacctcaagttttccagagacaccacctggccagcctcattcaagttacctgcttagggtttaacaaaccctcctcacaaggaaaaggaaataaatagcaaagcaaggagagaaactacatttggcactctgctttcatttcataggcactaaatatttgagaaagggagaaaaacaagtaggaaaaaacaatacaataaaagagatgagaagtttgacataaagaactcttgcttccaactttcccacttcaacagctattcagtaatacccacccccaagtccgcttgttttttcaatgttgtgcctgggtaggtgttgagttattacattagcctactaccttgctcatttaatacatctctactcccaactgttgcccttttgaagtacctcttgtgaatgtcttggagtaagtgcttatatgaatgttgttttctcgattcaaaaacagtttgacatattattaaaatgcaaatctttgtttgatttttacacaggctgaagagatcactttaacaattggccaagcatttgacctggcatacaggaaatttctagaatcaggaggaaaagatgttgaaacaagaaaacagatcgcagggttacaaaaaagagtgagtaaactaagcttgttgttttacatttgtgtgatgtaagtacagggaaacttgcatatcgtcaaacaaatttagaagccctgccattaaatttcacccacactgactgattggaactgctttcaccgtgttcccataatttttcgttcctgatcccctgcacagttttttttttttaactattttatattgaattcccacaagaacttagtgttctcatgtgactttgcttcacttcctgatgcttctcatggggatcagagcagcagaagcagcagatgctgggtaagtggttttccatgcagatcagattccttggtaattaaattatgcctttctccactcttcaaaatcatcataagcaagtttcactgtcttgtggttatattccaagattatgggtatagattgcacagtccaacaagaaaacacaatgttgagatattaggaacataaaatttgcacacacataaaaatatattataaatttaagtctttcaatgatctagaatcctccagcatttcccaagctttatcaaacaattttctccccacgcacaacaaagtacattaaagttttacgtaatataaattcctactcataactgtagccaatattttccaagaaaaaaaaaacagaaagttattcaataatgattttctttttagatccaagacttagaaacagaaaatatggaacttaaaaataaagtacaagatttggaaaaccaactgagaataactcaagtatcagcacctccagtgagtatattgaatatccttagaaacaagattttatggtgataaaacatctgtgtatcactagttctgcaatatttcatataatacttggggatcagtaatttcaaagtaaacatggatagagatgaaggctgctaagcagtttaatttaaaacttaaaattacctagtcagttcaaatcagagttgttttctatgttgctgttttcctctgggttttctaacataattcaaccctcaggttagtcttaagttttattacataatataatttttctctttgtggcatattcttcttttgtttctattaattactatttgctgggttagatttaatgacctatgccagtctccccttgaagtgctcaacttcattgtaggaattcaactgtgagcaagactgaacctggtttcttatattacatggtaagggttcccgctgggagtgaggcaattgtatttcaaacattaaaatgagtggtattctctgcagacaaaactcaagtctttgtagttaaaatatttatgtctgacttgtcacagttttgaaatccttttcccaataccatgtatgatatcattattacatgattttggcaaagggaatttattggagggaggtggaatttaaaacaatattttttctaggcaaaatatattcaggaaaagatatttttctgtttgaatcatctgtactactgatattctttattaaagtgtatttattattcttcatttaaaaatatttaatatctatgccaagcacagtggcttatatctgtaatcccaacattttgggaggccaaggcaggcagatcatttgagcccaggggttcaagaccagtctggcaacatggtgaaaccttgtctctacaaaaaatacaaaaaattatccaggcatattggcacacacctgtagtctcagccactgaggaggctgaggtaagaggatggcatgagcccagaggtcatggctgcagtgatccatgatagcaccactccactgcagcctgggtgacagagaaagactctgtttcaaaaaaaattaatatctaacttataacataaacatgaactgaaaaaagaaatttgttgcaaaattttttatggaagcttattgtgcttcaatacgtaggataaactcaatgaaaatgttcatttcttaatatctaatactagaatcattcacaagctcatcactatgaaaaaggatgtttctatagaagtttcatttagggtttcaaacttggcacactctggaaatgggtcaaaaaatgatttttcctgtaaactcacatttttccacctcccatttgaaagagtgagtatttccattgcttggcagatggtttgtgccagtagggctcctatggccttgatgagagaggttgggactgaggtaccaatgtatctatgctggagcatcctcttcaggttctggttttattctgatattccttcttattttttcttgtcactgtctgctgctcaccaggattatgatttttttcttgcctctctcgctgctagggacagaacatcagttcaaactcattattcaaccttccatcccaagatggaacacacatcctcttgggttttgttgaaattcatattgtaagccatgttgcgaaatatgctaggagaataagaataaatgtacttcatttatgtgaagggaagtaactttttcaaggagttttgataacgtagttgtttctggaattcatcacatatgaagagtagctttgctttcatttttgtgttgacaaaggagtaaaataagctccatcaccttcttggatgcaaatccaaacctggtcattgtgtaacctctttatctgaggaagaacatttgagaggagcaaagaggtttcaaacatattaataaaactgcagcctaccttttttatcttcccaaagcagacactgctctgagaagaaggtgggtcaggattattaatgtgcattggtgatctcatagggttactgagtcagcttcagaaatgacaaaggacaggaggaatgacaagatgacccttgcttcagtgtctttgaccatttggctgaaatagccatttcaagtggaaagcatgcaagttggtatataaatgaaacatagcctattcataagtataattcatttatttagcaattctcattagtagagccagttatatataaagagtaaaaataatgaaatagctatgttttaaaatgaattagcactcctgaggttacatcatttaacaattattttaggcattgtgttcatctcagcctggatttatctaaataaaatgcttcaaaaactacaactaagaggttgaatttaaaaacaaatcactttctttaaatcacggtcttacactgagttcatatatatgtagaaaatttattgtatccttgatcattatggaaataacaaattataactttgcaatctacttatagtcttttgtcatgtaatgttgttgtctacactttttctttaactttaaaaattatttgtcacatggctttttagctcttaaaatcttatcatatgattttttaaattgttgatatgctggaagatatacatcttcattaagatagaatctggaggacattatactaagtgaaataagccatgcacagaaagacaaatatcacgtgatgtcactcatatgtggaatccaagaaagtcaaactcatagaagcagagagtagactagtggttgctgggggctggggcagagttgtggagaaagggtctagaagatgatcaaaggatgcaacattttaattaggagaaataagttcaagagatctcttgtacaacatggtgattatagttaataacaaggtattatatacttgaaaattgccaagagtagttttaattgttctcacaacaaatatgtgaaaatagaatttatttgatttttagaagaaagtgaactcaagagcattttaaaattgctaaaatttaaatgtaaaattaaatgctaaaatgtaaaatgtaaattaatgagatatctaaccaattcaaatggtttaaaaaacattgttacagcatttgctaatgtgtttcctattaaaaaacatttttgcctttcatttcaaattttagtaatgtagctatgaaataaactcgtagaacacttaagtacagcttatttatctcatatctattcaaatgagctcccaaattcctgatattaaaataaaacaaaaatagttacctgcaattatttttgaagatttattaatgattcagattattgaatttgaaaaacagacaatgcaaattgcaaataataaaatgtgaatttaaaatatttaatagcttaccatgtgtctgcaataaagcaaatttctgttaagttagaaatgttttacatctgttctttcttatgaaatttgaacatcagttttacaggacacacagcaggaacacaaagtacctcacagagtgcccccatggctagcaaagtaaatgtttaatgagtttataaccctggaaataggactctgtgggttttatgtgtttgttttgagctcagaggactgaggattagagtgctccaaaatgagtaagttctcatcagtttattcaaaggattagaggcagtgatctacacattcattaaagaagcattgaagtaaattatgaatcccgtgatgcatattgaattacaacataggtgggtatggtgtatgcaattaatttagcatctgatgagtttttagtggtgagaggagcccctaacacagaaaactcttcacaactgaccagcccaagacaggtcttgatcccattggaagccaaatttttcaagtcacagaaaggtgacacttttgtcaaaaatctctaattgaggtgtagttctttataaatgatttaatgctataatttggttcacaaatatatacttataagcacaataatgttctaaaatatctggatatgctggtctaacacaatatagttcacactaagcaattgctagtcaaataaaagacatatttaatcttagctttagtatagtctctttggggaaagggaaagaaaaaaagtaggaatggaattttgggagttgtggaattaaaagtaaagtgaaaataaaaataatgtaaatcactattatagatattattttattttcagtttatgatgaagtagaagatgaagccagatgtggcaagcaacagaaacattcttgataaaatttgattaggctgggcatggtggctcatgcctatagtcatagcactttgggaggcagaggtaggctgatagcttgagtccaggagttggagaccagcctaggcaacatggcaaagccccatttctaccaaaaatacaaaaattagctgggcatgatggtgcatgcctgtagtctcagctacttgggaggttgaggtggaaagattgcttgagccggggaggtggaggctatggtaagcctgggaggtcaaggttgcaatgagccgtgatcatgccactatattccagcctgggtcacagagtaagaccctgtctcaaaaacaaacaaacaaacaacaacaacaacaaaacttggctagataactaaaaaatgacaagccatcttctctaacaagaggtccaaagttaaagttgaatttccgtaatacaagacaatgattcaaatctaccaaatcgtctaataatatattacagtcttattgatgttgatatccttattctatgttaaatcataaatttaaaatgtgaggcccaatgcagtagaatgatctacatggacacctttgtattttaaagagtctctgtttaggtgagaacatacgtgcatgtttctactttcctcagagacactctaagggaaggttgctatttcttagaaagtttgtcagtcacttatatgttatatacatgaacatgaattggtcatactgatggattttgaattgcaaactaaataattttaggttgaagccttgaataaaaatattcaagacttctaaaaagttccctcaaggttttatggtgtacattttagttttggttttggtcttcctagtcccactgcttcatcactgggattttgaaattgttcttagtagtagaccgtatgttacaatgcatatcactttaattttcattttgtctcacttgtctattgtatacatttgatatagttgtgatctgctatggaatattataaaatgtgtactgaagatctaatatttccatacgtctaggctctttggtttttacagtttatgtatttcagatgttaaagggtttacatccatgggggaaagaaagagaggttggtaataaacacgtaaatatttcaataaatacatgtaaaaatgtagatcttatatatgctatgaataaaacaaaatagagcagaatagaagagaatgattgagaattttgtttagagaaagtgaccagggaagcaagctccttctaaggaggtagcacttgaattgcaatctgaatgataaaatgttagcaaatgcaacaggctgaaaacaataacaagaactttgcagctgcagtgtagtgactgaaagccaaaataattggaaaagacattgaagagaaactcagagtctagatttgataagccttcacaggcaatggcaaaggattggtatttttttttaatgcaatgatatgtcacttgaaggttttaaatgggatttgtggatcatctggctgctatatgcagcatggactctaaagaggccaaagtgatatcccagaaggagacatttcagtagtctaggagaagggtaaattggcctataattctacctgtggaggttatgagcagagcttgatttttgacacattttgaaagtagagcttgcaaaatttactaatggattggttgggggcagtacacacacacacacacaaaaggagcaggaatgtcccttcaggttttctccttaacatgtgggaagtgatgccattttctgaaatagacatgacttaggagtagtgagtggtaaagaatcaatatttcacttttgcctacgttatttctgccaactagacagccaattggagatgcttattcgatggctgaatatacaaatctggaattcatagagaaggtctggtctcatgatgtgtgcttgagtgaaaaaaaaaagcttgtccttttttattgtcattgtttattgtttagttaatatgcccaatataactttggtcactgtgagcttatgtaattgagttctagctaaagaaaataatatgagactacttttttgttcagtattaaaattaagacatccctaacaataaaaagtatacctttaatatttgcttccgacccttttcacttaaaaccaattcaccaattcttcatatgcatgataaatggagaccactcctatttctcactttctcatataaaaattgatatgaatatataacacttcatgtatataaaatattttcttacttgtttttaaacagaatacttacatatcttctaaataccacacagttgggtcaatcatgggttccttttctatcaagtgaaatagccttcaattgtacctatattacatacctctgcatcacactgaaattgtggaaatcttttcaatggttttagaaattggatccttattttatacagtcacttagatacactgagaaatttccgttacttgactgtgctgtttgctttttgctgtgtttcagtggtttggcaatagattagaggttgggttttccaccatttggtactaattttctgggaacaatctgatttccatttattacattcatatggcaatgctgcctgtatttatattagaaaaagagtttattctgccctcatagcctcatagcctcatgaatgcctgcagaagattgtttcattataagatgtgggcataacaagttaaatcaaaatgttcctcttgattcttgtatctgggtactttcattttactcttctgactatagaaggttttaaccaaaccagactattgccaggaagttaagtgagtaaaattgtagtcctagggaatactggattctattgctgagtaaaacaaatgtcttcctttcaattaaacccagtgttagataaaattatttctttacataatcaactgtgtggccactgattagacttgataggacaattataacctaaaacgtatatttcattgtggataaacaatgtatctatttattttcctctagtgttttttctgctactattgaagtgagaatgggcaagagcagattgtgaaaggtcttaattacacaacaagctgaatgtgaatctttaaacaaaggcataaattttaaacatgaattggttcaagaatatttgatgcccacaaaaaatgattaccattctgcaacttcactttcataattgttagttgcacaagataattctaaaagcataaaccctgtctaacgggaagaaaaatatgttcccattccagttctgatcataagtacctggtcaagtcatttagcctctccttctttcagttttccactttgtggtacaattatatccatttaacttgaaagattcttgtgaaaactgtaagatagtaggtcttacaactaagagatcagtataaaccaactgcagacctagaaatctgaaaaaacacagatcttctgctgtaagttctaaattagagaagtcattacctttaaactttatttaaaaagtgatattgaagatacattataacaatgaactttaaaagtatgaatcagcatggtaatctagaaagatctgctagaacattttatgctaccattttctttctccatctttaatgttatttataatttttcgggttttttaactagaaaaaattgatttaatatataaatgtaagggaatttatttcttaattatttcttaatttaattataaatagaattttgaaccctgccattttagtaattgtgataaattatattttaatcttgacatttttgttttatgtttaaaaagtctttggatatttttattgccagtgcaattaacagcaaaacataaaatttcattataatgctaatatttctgtagatattatgacagaattgcttaatcttaaaagcagtgtttctgttattattgtttaaatgtatttaatatttgtggatagaattcaaacacttttatatttctttttgttgtcacatttatataaaactcaaggttgaaatattcaccattgcctaaatgcaccaagacactacttactgaaaaaaaagagctacaaaggggagggagagcattaggacaaatacctgatgcatatagggcttaaaacctagatgacaggttgataggtgcagcaaactaccatgacacatatatacctaggtaacagaccttcatgttctgctcatgtatcgcagaacttaaagtaaaataaaaaaaaaaaagaataaaaagagctacaaaaatgtagcaacaacaaatctcaaacatggacactcattattaatatatctgaataacctaacaacttctgtataattaccatataatttttgagcacagaattcccctaagtataataattcagatactgtgcatgttcctaaagaccaaaacacctggaactacgaacataaagcagttgcttgaacagtggtgccatgtacttctgtaggacaatccaaaaaatttggttcctagccatctgtcagaacactgacagaaagaccaaaataaaattcctcaaactgattttcttctcaacaatgtatttaattactttaacacataaacatcctcaaccagttaaaaatagcagccaaaaaaaagactggttccagaaccttgaaacctaagtgcgaaattgtcactgtttgccatttaggtgctacatccgcacgttcatatccttattgaataggcctaaccatttagtacagaatcaagcaccaaatttatccatatatttaaatgtgctggacttagatttcatttttatagggaattacatataacatctgattccttgacttgaattgcttctaggttaggaatcaaaaactcaaactttaatatagcccagattatgacattcaagtgtgaaatgggcatatggtaggagtgataaatttgaaagcacaggctaccttcaaagacacagcagatattcaataccactcaactattttcatgcaagtatgtgggcccactttctagatttcctaacttctggagaaaagttctggattttaatatgtaatctatttttatatattaatttatttttaatttaaaaatttctattgatacatattagttgtacatgtttgtgggtagagatgatattttgatacctgcacacagtgtgtaatgatcgagtcagggtaattgcaatatccatcacctcaaacatttatcttttctttgtgttgggaacagctagttctatactttaaaagacccatgtgatctaaacaaaaactgccaaattgctgatgatccaaagaagacctgtgaggactagttctggagtattaaactctagtaccaaaacagttgacattattaaatatccctgatttaccattctgaaattgaaaaaacctcttaattgtagtatataaatacttgattatttttatattatatacattctccatttctgtaagtttacctccccagaggaagtagtactatgagaatactgcagacaccatgataaaaataacagagcactttcaagtaaggttattttgaccttcagttggttttcaggtacctagtaaagaattttggccaacatatatcctaaaaaatatagagtattaccatgtatattttaaactagataatatcaaggacaacttccacttaatatcttatctttactcagtacagacagccttatcaattaacagtttaagtaaaaagatgctctggtataaattagacaataaatatcatttacactaatgtgttacatagagtatttgggaacgaaaaacaaaaattttctcacaaagagcttacaattgtaatctgtaattaaaaggtggctaccaaggacagaattttacagtaagttatatcgaacaaaaacagattttaaaaattgtgtacatacacatctctacataaatagatggaggtgtattacaatggagatcaaggccgggcgcggtggctcacgcctgtaatcccagcactttgggaggccgaggcgggcggatcacgaggtcaggagatcgagaccatcccggctaaaacggtgaaaccccgtctctactaaaaatacaaaaaattagccgggcgtagtggcgggcgcctgtagtcccagctacttgggaggctgaggcaggagaatggcgtgaacccgggaggcggagcttgcagtgagccgagatcccgccactgcactccagcctgggcgacagagcgagactccgtctcaaaaaaaaaaaaaaaatggagatcaacagagaaataaaaaattatgtatttatatatgcatattaatagagtgattaattatataactcagactagcagaggttctgcttccacactgaacccttccctcaatttaatctctcactttacatggcttcctttttctctctgcttccagaaatatgtgaaggggggcctcctagcttaaggacatacctcagacttgttggtccttaaaattctaattttagttactaccttttacaataaagtttatcaaaaatcagattatttttggctgcctgaatttttgttagtggtgaaagatctctgacatgtgatttgcggctgaggaatgtggctcccggccagaatcttatgtgcgatctttctggcccgagcgtaggcagttacaaaggctttgcctggcacacctcatcacattgtatttggtgggagaaaggtgccctcatcacattgtatttggtgcacagtttggaggaattgaatctagtactcaggtgccctggccagccatgctcttgtgcatatctgcatttatagcccaggcaactccactcaggggcctccttttagggggccttaggtgcctctcctgagaccaccttattcgagggtcttggagaccacttttctccagtatgactcagtattcagtacttttctactgctagcccttcccttctccctcctaccgtctcttgtccgaaaaaaaccctcaggaaccttttgttcaggagtccctaagtaatgagacaaagcctcacttctgcagtgatacatctgacccttgctcaagtgccattccttggggaaaatggagcattgatggagcaggcaccttctctctggcctcttgcttatactatagcagtaaatgaataaagacttaattattacttccattttggctgctgtttaattggccactgtgacatctggcagctcagctctctccagctcagctcttaacagtagctttccatgttgtaatggaaatagcccctaaaagtcatgcacatactgatgttcagacctagtacactgcttgcttgttattcattatctctctgatttatttgagatccttgtcaatcacctcttcccatcacccaaaaagtcttacaatttggagctcctcatgactatagaaagggcatgatgactagagtcagactgttttgaattttgaatctgctttctacctcatacaagtcacaaagaatctgtggaccttaattcccatgtatttattgtaataaggacataatatcactactactgatacttcaaataatgttttgaggattaaatataaaatgtatgttgtaatcccttttgaaaattctacacaaccataactttatgtacaagagtttactcctagttctgtaactgttctctcattactatccttcctttttccatttcattacagaagccctctccaaaataaatcttcaggctttcttcatgtttctctccattaccttcctcttaggtcccgatgaatgcaatattctatttaaaataccaaaaaatgtaatatttcagtaaaaaaaagatcaaattaagcaatccagaatctaaggactatcacataggaaaatcaactctaactctatgttttaattttagaaaagttactgtgaaatgatcttatcatcttaacaaaacaccattttacaaataaatttcaagtatactttctcctttcctccatgcctgccctcttaggatatttctttttctgtcattcctttacagctgctgcacaatatgtctgatcatgaacaacatgtgtttcagagatgctcatcctctttctggcgtagtaatggtgattcatctccctgtctcaatatttcttccatctctgtcactcctatcaactcgcctgattccagactatcactgggactgttaataccaccaccttctaaatgtggctttcccaagccagtcagtgagagcagcatcccaagacctcatgtaatttgctaagcagataattcttttttattatcccacttattttgcttaaattctgccaaaatgtgctatttgtaaagttatcaaaaatttagatgtatcttgagtcaatgtgatgtgatctggagcctttgtgtgccattgttgttttctttgattacctgataccagaaagtttcaagtagagggtggtgacagtgtagaaatttacatacagatacttcaaaggatctatcagatgttgcagttgggaaattagatcattggtaagagcaatttcagcagagttcagtgcaaaaagaacaaatctagattgataagagttaaagatagaatgaagtaaatcttaggacagaaagtgtagtatctctttcaaggagcttagccttgaaggaaaaagaaaaacagaatagaggctggaagattaaagagggacagagtaaataaatttttgattgatttgttttgcttttaatgacagccaagattttagaatttttgtatcgtgaaaaagagtagagatatagaagtgagaggggatacaggaatgggataattaggggaatggtattgctgagtaacagtaaaggggtgaggggatacaataaacaaattgttaaagaaagggggatgacagcaattttcctgcatgaaaaataatgtactagcaattattttagctgaatagcaaacccatcattctctacacacaataagcctgattttttcatcacctgcactacctgtgaatcagaaaattaaacgtattctgagaattctaattttaatatgaactactggaagcaatctctgtccaagttctcacaggaaaagcaaatttttcgccactattcccccaaaatggaaattctcttttatccctgatcaaatcagatggttttcaaaggagattatacatatatacatattgttccctgttttacaaagtgataaatgtctaattttgatattacttcttggctacattttcatgagattttcatttatctttccctatatgtgttcagtcctggcccagactgtatcagaaaactcaatgatttgggcagtacactggcgattattaatttagtttataagattgctatttattacagaaaacttgatgaaatctttcaggagtaaaatgtactgcaatgaatatcagttggttcccattgttgatataaatacaaactaaaatatactctacttttgagaatgcaaaaaaaatcaattgcatttgaatgtttatatttaagaaggcaggtcacttatgtctaattattccagtttaaaatgtaatcttatgcagcgtatcttactgaaatcatatttttacatgaatagtttctaatatatctaattctctgttacaagtagcagtcatttctatatatcccaaaaattcactgtatcttttatattcatctggaataatattgtcaccgtttttgccatcatctttgagagcatttttacagaaattttctattgctttcttctaaatgagcatttatcataattagtggaaccatatgaaattgcgaatacttaactatttttggtctacaaaatggcaaattcttatgatgcaactgaaattgttgtttacatatattttatatgcatatgaaatatttagcattacaatgtgtctatatgaaatattaccctaattcatttattttcattgcaggcaggcagtatgacacctaagtcgccctccactgacatctttgatatgattccattttctccaatatcacaccagtcttcgatgcctactcgcaatggcacacagccacctccagtacctagtagatctactgagattagtaagctttctcaacaaatcaaagtttcttgttatagttgcatacattttaaatatataattaagactttgtgggaaattacatatcttaacaaccttacttacaattttaattattaaagtattatttttatatttgtataaatttccattaattctattttactttataattcagactacactactaatgacatctctgcttgcaacttttacctattgtgtgaacaattatgttttggtgtattacttcatatttaattatatatcactgttttgggttatatttttaatattttactttaacttttaaaaataactggtggtaattaaattgatcattttttacatgtttaatagagctggttaaaatatttttgttatcatagggtttatggacttttttgttaaaaaatatataaattatatcatgatttcttaaccttttgtaagggttctttcctatctaaaatgctataaattcattgcttttctgttttatcttttatatatctggaaggaatattaaagtctctttttgatgaattagaaaacacctataagcctgtaaaataaaaagcaagttagttacttgtaaaatacaatgagcatacaggcattgggtgaacgtttccattccaaattggagaaattggcaaagcgaaggagccacaggccccttgcaagtttgaaacccggtggggcagtcattaaatcttaaagctccaaaattatctcattttactccatgtgtcacatccagggcatgctaatgcaagggatggaccccaaggccttgggcagctccacctctgtggctctgcagggtacagcccccatagctgttttcacaggctggcattgagtgacaggcacacagtgcaagctgttggtggatctaccattcgggggtctgaaagacagtggccctcttctcacagctccactaggcagtgccccagtggggactctgtgtgggggctttaaccctacatttctcctctgcattgccctagtagaggttctccatgagggctctgctcctgccacagacttctgcctgaacattcaggcgtttccatacatcctccgaaatctaggcagaggctcccaaagctcaactcttgtcttctgtgcacctgcaggcccaacaccacagggaagccaccaaggcttagggcttttaccccatgaagcaatggcttgagctgtatcttggccccttttagccatggctagagctggagtggctgggatgcaggacatcaagtcctgaggttgcacagagcagcagggccctgggcttggcccacgaaaccattttttcctcttaggcctctggacctttgatgggaggggctgccgcagatgtctgacatgtgctggtgacatcttccccattgtcttggctattaacattcagctcctttttacttatgcaaatttctgcaagaggcttgaatttctcctcagaaaatgggttttctttttctaccacatagtcgggctgcatattttccaaactttttgctctgcttcctttttaaacgtaagttctaatttcaaattatttctttgtgaatgcatatgactgtatgcttttagaaaaagccaggtcacatcttgaatgctttgctgcttagaaatttcttctgccagataccctaaatcatctctctcaagttcaaagttccacagatctctagggcaggggtaaaacactgctagtctctttgctgaagtgtaacaagagtgctccagtaacaccttgatagatttttcagtgtctaaatattcctgagtatcaaagtttgataaatatagacagagaaatagagattatatagacataatctatataagtgagtcactccaagtcacttcttgtcatttcgtttactaaatttttacttccttttacaacgggacatgtttgaagcagaaccttttcaccaaatcttccctttcattaattcattttttaacaaacacctactaggtgaaaaacattattcagtatgcttatggtgtagtggaaaccaggacatttctccagagaaaagatcctctgaaatctaaattttgattgattgcctgagcaacactaaactgaggaaaataaataacagcaatagtaatattcatcagttatatataaggtaacaataaattcccatttgattaggatagccctggcttatagatttttacccagtgtaactattggaaatgctccttttagttttaaaagcatctgtatttggatgataaattatatgttctccttatttatacaatacctgcaagtacaaggagcttgtaagaatttcacatttattaacttatttaatacaagaatctgggaaaaaacatgaaaactggaaaagtaagactccttcacaatgagaatcacagagtgattttagaggatatggcagaaatcaagtagcataaatattatttcttttttaattttttaattttttaatttttttattatactttaagttttagggtacatgtgcacattgtgcaggttagttacctatgtatttcttacatagaattgaatttagagaatgtaaagttctctgcaaaatgaaggtatgaatatgttataaatactaattttcatatatagtgtaatgtttttccaattaaggatacatttgaattgattcagaggaaagaaatttcttaagaattttttattttaaaaatcccataataggccgtaatctatcaattacaaacatcaattttaactttgatacttctttagtgataaaaaagtagtgcatactttagaacatatgtacagaaagcttttttgacattgcattcctgctgcttttaaaaaagaaatgtatttctgggataggaggcatttttaaagaaactatctcattgtgactatctagaaaggtgacatttcatactacatgagacaatgtgctttaaaattttctctgaataaaaggagagataagagtacatgaactttgagtagagctacttacaagtctacttagtcctacatattgctttactattgtgttgcaaggcatcaatcaatggaattagggtagtctcaatgagtagtgcattaattttagcaaatttaaattgcttcaataaaatataggtgttgtaacatacaattatcagctctttggtgaatttgacattaagaaatcttcactaaaacacagaaacctctctagataataattctttataataaaactttttaatatcataaaatggatcttttcttccttgttaatgtttaactggtctaaggtcaggaaagcccaacatacagtgtaagtgtgggttagtggcttatttgatcatgtaaatattcatttatataatcctgcctttgaaatctaactaactccagctcacttcttgttatttcatttactaaattatttccttccttgcagaacgggacctgtttggagcagaaccttttgacccatttaactgtggagcagcagatttccctccagatattcaatcaaaattagatgagatgcaggtgactattttgatagactggcccataaatgatttatttcattttgatatgggacaaagagaatgttatgtaccaaaactatggtttccttcaattattttcgctataaaaactcgcttaaaataattactttaaaataataatgtacagttagtcctaaaaatactcctacatatgctaaggataaggttgttggttttttaaatggttcaatttataatgtcaataagatggttcattttttaaatacaaaatggcatggattctaatggttcattgttctgaaatctagagttaaacagtcactgcattagatttataagatttgatctcagtcttaacaattatgaatttgaaaattgtaaatgggtagatgaaggaaaatctttgtaagagtgaaattattctctctgaaaagaagcattgtagctgtagttcataacttttgggcttttatttaaaaagcaaacaaccagtgacaacttatttaggaatgtagttcagttgggttttcatttctctctcttccttttacttttttgttctaaattggtctgaagtttacagaaattggttttaaatgctttgcactatgggccatgatttaaaaatagtcttataaaccctagaataaagtcttctctttatatttgccctttacattttggtgaagttattatatcctatttttcatcaaaaagtttatatatggtagaatccagacagacaccaattatatgaagctgattgagaagagacaatgaagacactaaagtaaggagaaggaggtatttttgtttattagtcttgggttaatacattaattctctatgcctcacttcctagaaaaaacaattatgggtgaacactgatctatcactgataattgcaatccttcttagaaagttaatttaaatgcccttttactcatttttgactgcagctgtgtagctatcttattttctaggtagtacatgaattcattattgttctagatgtaataacatgcctgaatttaaaagttgaattacttaacatatgtcttgaggttttcaaagaatctattaaaacagtgtttctcaagttgaatgattcttaatccccttttacataaaaattgttttagatccttagtattaacttacaatttttaaatattgacaaaaatgttataaacaacttgtccttatggtttttataaaattatgaattcaataaattataaattaaatgaaagccaaattgcaacaccaatacaggacggatgatcttatttggttaaagctaaaaccaccttatcaaatttctattgatttcaacatgtattctatctgatggcacagatttcctagttcttttctatatttcaaacgctatgaaactttcaaatggcgcatgataatttagcaagaatgctgtatttcatatgaaatcaattccttttcttttacattagttttacccattggacatgtactatctggtactaatgcttttgtagtaacaaagaaatatttatgtggtagtatttattctcaagggttgcacaggtcatacagagtacttctctaaaaattttttagattttcccaaaattggaaaaaaaattatggagttttaaggataagcctctatttccagattttgttgaaaccaagtgtgagacacaatgtattgggatgattgagtgatggtgacactcaatgttaaaccgtggtgtttttgcttttgctgtttctaatattttcttaatgtctttttaaattctttactgctttcatggtgggtagcgccagagatggttggtatattatttttataataattttaaacaacttacaaatttttaaagctgaaaccttaaaatttgcatgccttatttaataaaaattcaaacaacagcttcatatgggtatatctgataattagttatgtttagagaggttttataaaccacattttaagattatttttcagtgacttagtcactattgcattgttcacttcattgtttcctttcttttctttttttttttgaggcagagtctcactctatcgccctacccaagctggagtgcagtggcatgatcttggctcactgcaacctccaccgcccgggctcaagcaatcttccctcctcagcttcctgagtagctgagactacaagtgtgcactaccacgcgtggctaatttttgtattttttgttaaaaacagggtttcatcatgttgtccagactgggcttgaactgctgggctcaagcgatctacccacttagacctcccaaagtgcttggaccacaggcatgagccaccatacttggccatgattgtttcttttagtccaatatttacttgcaaggtcactttaacaaaagtaaaataatattttcttcatctaaagtctatgatggcttttattattaatcgtgctagcctaatgaatctaatgcagacatttagctatctttgcatatcatataaaaacttaatatagtacaatgggttgtgaacaccatattgagttaataagcctagtgagacatttagttttcatctttcatttacagagtattgtgactaagctatttttaagagaatcgaattattaagtttgaaatcacagaaacatctcatgcatgtaagcatttatgcagaaatgttagaccatatttcagtataagcagttagaaaattaaacatctatttgaaatcaataatgtagctatttgatttgacataatttaaactgtccagtacatgtcaccaacaggaaaataagtggaatagtattgatagcccacactgtaacatgtgagctataataatttaatacattaaaaaacaagcatggcaagttcatgaatgatgaaagaatcatgtatgagtggtgttaagtcagctagctagtactctgggagaagatcaatgtactgctgaaacttacagcaaatgccgagataaatttcagaagtaatcaacattttaaaatatttaaaatattattgaatattcatcagacttttgaattgaaaagaaaattttataaggaaaagaaaaatacggacatatagtatccaattttttaaaatttactgtctaaaaatatataaatacattacatatacataattaaagcaattagacaaatggctaggaaactaaagaatcaacagataaataaaaaagcactagttcacaaaagaagaccacaagtggcttacacatatgtagacatgttctgtctaatcaaagtaaacatataaatcaaataaagaactgtaatgctattttaatctagcagattattttttaaactaataatcaatcaatacaactgaaagtgtgataaaacaagcactgtaaattgttggcagtccagagttagttcagaggtaactatggcctagcagtctctttaaagggtagcttgttattaatacttttatttctgtttgatatcaaaactttaaagcaatctattctgatgaaaaaataagtatgaatgtgttcaatctctgcgaataaaaatacctagtcaacattattcataattttaaaatgctgaacgattttttttcaaatcaacgtaaaatgcatttttacgatggaaacaatcataaaaattaatagcattttatatagtcataataaattagttttgtgggaatttaaaataatcagggtctgcaaagatgaaaagaggaagatagaaaactatatgtaatatattacttacataagaaaattatatggcataaatatatattcatattatcattaaaatcatttttaaaaatgtatagatagaaaaaaagacatacctcaaaatgtagtgatttttctttccttgatatgcttttctatttcaaaataagaaaattcatcaaaatctttcgtataaaaagcatatggtgaataatactttaattatttaatcattcttttgtgtgacgttagcttatgataattcccatcactacataagtaaataaagtctcatttttattaagaagtttgaagctcaacaggtgtgggaaattttatctgaggaagaaagaaaatcaagaaaccttataatatgtaaggatccttaaaaagtcaatatggagatagatattattgtaagtcatatactaacactttattattaaaatagtgattgacctctgttttactttggctgctattctgcttttccaatattgataacacattgacaaatagtattttcagggtaattgaagtgatactggtttactagcagaatgaactgataaaatttaaaagtaccgtatggtatcaaacatttccacatgtaactctctttctatctgtcattatctatcaatgtatcatctatttaccatttgtaatataccagaagatgacataatatacagatcttcagatatccaaataaaataattttaaagaaaagtttacttacagtattttagtttaaagtatttatttttctaagtatttgctggctgtttgaaaaatataaataaatatggcaaaatgtattttgtgataagaatagatttttaaaaaataatgataagtagtctcatatttactcaactaaataaagattgtattccaagtactggaaagacattttgaaaaactttcacaatgattacatcactgtaattgctatatagtagtagtctctgtgctgtaaacataaagaatattctttgaacattaataacaaataaagtatggcttacagctttgtaactaccttcctcctctatatgatgatgtttacattggatttatagaaagataagaacatttacataattattctaaataaaagtaatttggagagatgcaaaaagatacccaattagctaacatacaagtagatatagtcagtccaattaaataaaacacccaaagcagaggtgaaaaccaatggttacctttaggagacattttgttttctttaggaatacactgctatctgcatattatttgccaataatgtgttgcatggccactccaaattacaaattacctttctgaaacatttcagttctgttagtaagaaaaaaaaggtagagtatgtagagagcactaccacatttgcttctacaaggagacctacaatgtaacctccactttcattgatcagtgcaagtctgtgcttttcatctttttgtaggccaatgtgtatagatttacaggaaagggtaggaatggggagaggtggcaagactggagatggcccacagttcaattatcttatgcaataaaaaaaaaagagattggagtgaaggaggacagactcctatgccattattttaattcaaaatcttggtggaaaaacactttcttagcaattgtgttcttatactcaataaatcatagacaacttaacttctaaaatatgcaaggaagagtaggagtcaaagaagccagtccgctacaagcaacagcaaggctagtaggggaagttttctccatggcaaagtaatctgcagttgtgtgttccacagaggatacggcattgcatttaaaagaagtattttacccgggctctggtcagtgctaaccaggaataaggtgaaaatcatcaggctatcttgaacctctcatcaatttgaagcctaactatcttaataatatttaaattaataataatttttaaagctaacagatttcatttacaatagaatgatgtagtaactagccttttctgaaaaagaaacctttatcttaattttatgttttctcttctgtctctcatgcatgctaacctcacatagatttaaaacattaaagtgttaatgggtctgaaagaactaccagtgctatacacctatataaaaattcagcaagtcaacatttgacatatagttatttattagttgatcaaagcatgaatatttcaactttagtgcatagtcttttttattcactgattttattttgctgtaagcatttcagatattaattattttattctgttttacaggaggggttcaaaatgggactaactcttgaaggcacagtattttgtctcgacccgttagacagtaggtgctgacatcaagaacaagaaatcctgattcatgttaaatgtgtttgtatacacatgtcatttattattattactttaagataggtattattcatgtgtcaatgtttttgaatattttaatattttgaaaattttctcagttaaatttcctcaccttcactattgatctgtaatttttattttaaaaacagcttactgtaaagtagatcatacttttatgttcctttctgtttctactgtagatgaatttgtaattgaaagacatattatacaaatacctgccttgtgtctgagttctatttagttagcatcttgaaatttgtattcattttccagatggctagtttattaatgatttcccaaaagccataccttaaagataactttttaaattctgaagagacatgccaatgtcaaactaaacatgttctgtttttaaaccaacaaacatgttactattcattggacagatatcattttatgtataaatactgttcacatcactgggaaaatgtaaactttaaacataatgccacaaggtcactaatttctagcaggtaaaattataaggatataaattccaataataaaccaaatgtatttagagtatttattagtaaatgcaaggtgatgttagttatgatcagttatactctaaatatttaatttgttttataaaggtagtgaaaaaatgaaaatttgctatttattaaaaaacattaaatttcattccaaatgagataagtgatattactataacatctaagcatcatctgatttgatattccctaaaaaacatttggaatatatgctatctatagattcagtatctactacccatatttactttaccaaatatatttctcctcactgcataaggactactcttctcatattttcttctttgatgaagatatttttcaccaaagtttattttgtgatgccctcttggttttgatactttaaaatctgtggcacccgttctacatgaattatcaatatttggtaaattcaatctgtatttgttttgttaaagtcaaaaatctcattttccaaaaaaaaaaaaaaaacccagttactgctcagtttagtcttgaacatgagcaataaaattctcttgcatttcattattgatgtgctgatgaacctggacttttaaaaatatttgtttcctatacctttaccctttacctaacagactaatttgtactcagtaaaacaaaaatttatggtcaaaatttctaacttggttcatcacattataagataaataaattaaattaatgaaaatgtgacttagagtaggggtagccctcaaaaatagatttatcatttactcattggaattttcttcaagtgttaaaggtacattttcactaggaaaagaaatcaaatatgcttatgcaatatatatttgtgtgtttttccttaatgttatatggtatatatgagccttcttgtttagtttcttttatctgctaagttgtaccttaattagagggcaatatatgtttcataaagaagagtctttataattttgtttgtcagatagtattttggaatttgtataataaggatgtttagaagccatataagtggctttttttaacagatagaatttgtatttttattgtactttaaaaagatttatgtaataggtatatatttagtggccatttattatcaatggtaacacaatggagtactaagatggtatttgcacatttaagatatgttactttaccaatttttaatggtaatcaactctgctactggcatgatgaaatagtacataactggtcattaattatgaacatttatttctccagtgcgtttttatgaagatctggttgaaaattgtatttctatgtaaactcaacgatatgtttggttttcctgaaaataaatgattttaaataaattaaattgcataattcatttgttaaataatctctaattaatacagacacattctgaagctaattatgtaacagattttcttgatcataaatggagataaaagaaagggaggaagagggaaaggcaaagaagaaataaagggctttacctttaacttcatttcttgcagcccacacacattttagctttatgagcaaatatcattcagttgtgaaaacagtggactgatcctgctggtgagagaggtcatgatttgcttccttttaccagaagcatctggtgcaaaaactgtattatgtaaatatcaatttcataactggaggctttttttaacttagcagtaatgaaaagggtgtcttggctgatagttttataaaggtggaacttgataataggatgtggattatgactaagagtgcaatcatgaagaagttttgaatcaatttaaaacatgatgttaagtattttatggacacgggactcacatgcacagcctttgaacaccaaggaacaattcatcaattcattcaataaaattcatttattactcactttatatgaataacatgtactttatggggtaagaaaacatctagcaagtttgct

SEQ ID NO: 12 - DNA, 184429 bp, Homo sapiens
tccttttgagctatttttattaaattattctctcgtatttttgacattacttacatttaaaaatctgttttttatgatgttctttttacctttaatctttaccatatttgtaattcagttgtcttttcattcctaatatttttttctctcttttttccttggtaaatgctgtcaaatggttgttttattttctattttattagtcttgaaagacgcaccttgctattttatttatttctccttttatttctactccttccttctaattctttgcccatttattttgactatttttattttccaatataaatattaaaattataaatttccctcttagtactggtttagctacgtatatgaatgtagacatgtagtactgtaattattcaattataagtattttctcattttcattgtgatttcttacttggaggaatgtttttaagttcttaacatattgactttataaaataaaagctttcaattattggcatctgacttaatttcattttatttaatgcagtggtccttaaagtatggttccagaactagcagcgacaagattacctggtgtgaattgaattatgttcccccaaaatatatgctggagtcctaacctcaggtacctgtgaatgcatgtgaccttatttggaaactggtctttagtacaatcaaattaagatgatgccatactggattaggataggccctaattcaatatgactaatataattataagaagagaagagacacagaggcacacaaggaaaataccgtgtgatgatagaggcagagactggagtaattggaattttgttttctttttttctgagagtttcactttgttgctcagactggagtggagtggcataatcacagctccctacagccttgacatcctagctcaagcaattctctcatctcagcctcctgagcagctggaaccacaggtgcagagaactacgctcaactaatttttgtattttttgtagagacagggttttgccatgttgcccaggctggtctccagctcctggactcaagagatctgcccacctctacttcccaaagtgctggtattatagggattaaccaccacgcccagcttactgatgtgctaaaaagccaacgcatgccaaggattgctggcaataccagaagctaagagaagggcatcgagcagactcccctataacctttagacagagcattgccaacaccttgatttcaaacgtctaacctccagaatgtgagaaaatatatttctgttgttttctgtgtctgttgttttcagccacccagtttgtgatattttgttaagggcagtcctagggaaccaatacaatagaaaacctgttaaaaatgcaaattcttggcctcaattccagacctaccgtatcagaatctttgtggatggggtggagtaatttggattttaacacaagtctttcctgttattttaatgaatgctaatttgagaaccactgagttagagaatgtggtcaacgggatactagtcctttgaaatttattaagatttaatttgcagtataatacagggttaatttttgcaaatgtttcatatatgtctaaaatgtgcattttgcagttgctcagtgcagaattctgtatacgcccattaaatcaagcttgttaattgtgttattcaaatcttctgtatcattaacaatatttttggttctgtttatcaatcacagagatacattcaaatcttctactatgataatagaattatgtatttgttcttgtagttctgccagttttaaatatagttctacaaatatacacataacatataatgttattaggtacatgcatatttagaattctttcttcctatggcatttatctggacaaggtgaaagtaaatttttgatttggggtgttaggtcacatacacagcatgaactccatttttaagtctacctaaatgtaggcttatgattaggaatacacaagaaaatatcccttcgttccttccttccttccctccttccttctctcctttactcatttctttctattcttgctgagacagtaaatcgttccattaatttttttcacctgtgtctgtgcaaggattcccaccaaacaggctttgtgtgagcaacaaggctgtttatttcacctgggtacaggcgggccgagtccgaaaagagagtcagggaagggagataggggtggggccattttataggatttgggtaggtaaaggaaaattacagtcaaaggggggagttgttctctggctggcaggggtgggggtcagaaggtgctcagtaggggagcttctgagccaggatgagccaggaaaaggaatttcacaaggtaatgtcatcagttaaggcaggaacaggccttttcacttcttttgtggtggaatgtcatcagttaaggcaggaactggccacctggatgtgtatgtgcaggtcacaggggatatgatggcttagcttgggctcagaggcctgacattcctgtcttcttatattaataagaaaaataaaacaaaatagtgttgaagtgttgaggcggcaaaaattttttgggggtggtgtggagagagaatgggcgatgtttctcagggctgcttcaagtgggatcaggggcgggtgggaacctagagtgggagagattaagctgaaggaagattttgtggtaaggggtgatgtcgtggggttgttagaagaaacatttgtcgtatagaatgattggtgatggcctggatacggttttgtatgaattgaaaaactaaatggaataagacaaggagaaaaacaggtattaaaggactaagaattgggaggacctaggacatctaattagagagtgcctaaggaggttcagcatagccctgccagcaaagattatttatttactttaagagggagttaagagtggtggtttggggatagcaccaagagatatcagctgtgatggcttggagaaacagtgaaaaccggcagtgtaaacaagagcagggcatttatgagtagttgagaaaagtgaataggagtgtgactagacagaagatagtagggatgacaagttttttggggtgcagttcaagttggtctggcatctggaatgaagctggggcctaataaaaagaagcatctatacaggagcttaaatggactttaccttgtagcattccgaggacaggcctgaattatgagaaaggaaagaggtaaaagtactgtccagtcctttttaagttggaggctgagcttggcgaggtgtgtctttaaaagaccattagtccgttctacctttcctgaagattgaagacggtaagggatatgaatgttccactgaataccaagagcctgagaaactgcttgggtgatttgactagtaaaggccggtctgttatcggactgtatagagatgggaagtccaaaccgaggaattatgtctgacagaagggaagaaatgactgtggtggccttctcagaccctgtgggaaaggcctctacccatccagtgaaagtgtctacccagaccaagaggtattttagtttcctgactcgaggcatgtgagtaaagtcaatttgccagtccgggggtgggcgggcgcggcggaaaatctccaagcttgatgtgtaggggagggaggaggcctgaataatccctgaggagtagtagaatagcagatggaacactgagaagtgatttccttgaggatagatttctatgatggaaaggaaatgagaggttctaagagagggctagtggcttgtaacttacatggaagaggttatgaaatgacgacagaatagaatgggcctgtgaggctggaaggagatattttccttggtctaagagccatttgccttgtgtgggaagagattgataggtggaagtttcagcaggggagtaggtgggagtagccagatgagaaggagaaaaactgaaagtgagggatataagttggaacgctagctggttttttagctatcttatcagcataagcattgtcctgagcgatgggatctgataccctttgatggcctttgcagtgaatgactctgtcttcctttggaagtaaagtggctttgagaagcatttttattaaagaggcattaatgatagaggacctttgtgtagtgaggaaacctcttgcatggtggtgcaggatatggaaggcatatttagagtcagtataaatactgatgtgtagtccttttgcaagagtgagggcttgacttaaggcaatgagttcggcttgctgagaggtagtggaggggggcagagcagtagccttaatgatagatgtggaaaatactatagcatagcctgcctttgctggtgagtagcgattaggcctggtggaactgccatcaataaaccaagtgtgttcagggttaggaacacataagaatatggggaagtggagtgaatgtcaggtggatcagagagatacagtcatgagggtcaggtgtgatatcaggaataatgtgggaggccggactgaagtctgggccaggaacaatggtaattgtgggagactcaacaaagactgagtacagctgaaggagccagggagcagaaagtatatgtcaggtgtgaggaagaaaatagattttggaagttatgagagctgcagagagtgagttcagcatagtttgtgattttaagggcctctaaaagtattagggtggtggcagccaccgcacacagacttgagggctaggcaaaacagtaaggtcaagttgtttggataaaaaggctacagggcatggtaccagtccttgtgtaagaattctgactgcacagccctgcactttggctgtgtgtgatgaaaagggttgggatgagtcagggagagctagggtgggggcagtctctaaagctgtcttcaaggaacagaaagaggaatggggaaaggatttaggatctatggggtcagctaggtttccttttgtgagtttatataatggttttgttaggatggcaaaaccaggtatctaaagtcgaaagtatccaaccatgcctaggaaggaaaggaattgttattttgtagaagatgttggggtttgagagatcagtcggacatgatcggcagggagagcatgtgtgtttttatgagacttatgccgagataggtaacagatggggaagaaatttgtgcttgactgaagtaaagggagctgtctgtgaagccttgtggcagtacagcctaggtaatttgctgagcgtaatgggtgtcagggtcagtccaagtgaaagccaagagaggctgggatgaagggtgcaaaggaatagtaaagaaagcatgtttgagatccagaacagaataattcattgtggagggaggtattgaggataggagagtatatgggtttggtcctatggggtagatgataggcaaaacaatttggttgataaggcgcagatcctgaactaacctgtaagtcttgtctggttttaggacaggtaaaatgggggaattgtaaggatagtttatgctttaaaaggctatgctgtagcaggcgagtgataacaggctttaatccttttaaagcatgctgtgggatgggatattggcattgaggaggggaagggtgattaggttttaatgagatggtaaggggtgcatgatcggttgccaaggagggagtagaggtatcctatacttgtgggctaaggtggggagatacaagatgaggatgtgaaggaggctttgaactgggggtaaaggcagcagtgaggtgtagctgtagcccaggactagtcagggaagcagataatttagttaaaatatctcgtcctaataagggaactgggcaggtggtgataactaaaaggagtgcttaaaagagtattgtcaaagttggcaccagagttggggagttttaagaggtttaaaagcctggccatcaatacccacaacagttatgaaggcaaaggaaacaggcccttgaaaagaagataatgtggagtgggtagccttcgtattgattaagaaggggacggacttaccctccactgtgagagttacctaaagcgtctgtgatggtccaggaagcttctgaggcaattggtcagtgagccttgggccagagttccatgggctctgagagtggctgccgggcgagttggacagtccgatttccagtggggtcctgcacagatgggacacagcttaggaggaatcccaggttgcgggcattccttggcccggtggccagattactggcacttgtagcaagctcctgggggaggaggttctggaggaatccctggcagctgcggttcaggcgtttggaagttcttgtgtgctggagatgtggctggggtttgtctcacagtggaggcaaggaattgcaactcagaaatatgttgctacttagctgcccctactctattattgtacaccttgaaggtgaggttaattaagtcctgttgtggggtttgagggacggaatttaatttttggagctttatttaatgttgggagcagattgggtaataaaatgtatattgggaataagacggccttttgaccttctagggtctagcgctgtaaagcgtctcagggttgctgccaaacgggccatgaactgggctgggtttttcatatttgatgaaaaagagcctaaaagctaactgatttgggagaggtcggataaagaaaaaggagcattaaccttgactatgcctttagctccagctacctttttaagaggaaattgctgggcaggtgggtgagggctgtctcggaacgaaactgtaagctagaccgggtgtgagaaggggaggtgataaaaggattataggattggggagcagaggctgaagaagaattgggacctggcttggcctggcgaggggcagcctagagagaaggggagaggtcagatgggtttgtagaaaaggaggattagaaagactcagggacacttggggttgggactgagaggacaggcgggagggaaaggaggaggatttgggatgagtcgcattgggaacagagactagggagggaataatgtgtcaaagaatgcctggacatcaggcacctccgaccatttgcctattttacaacaagaattatctagatcttgtaggatggaaaaatcaaaagtgccattttctggctatttggaaccactgtcaagtttgtattgggttcaagcggcattgtagaagaaaataaggcatttaggttttaggtcaggttgagttgcagaggttttaagttcttgagaacacagggagaaggaggaatggagggtggaaggctgcccatagtgaagaaggcaagcccagagaaaagagagagacatggagagaaggggttgggggtgcttgcccccaggaaagtggagaaggggtagagacatggagagaaggagtcaggaggttctttcctcctggaaaagcagataaggggtagagacattgagagaaggggaagggggtgcttgccctccaggaaagtggagaaggagtagagacacggagagatggggtcggggaattcttgcccctccgaaaagcagtacttgccgctaagggtgaaggaccaaggcaggcgtcccagagtggtcaaacacctctgaaacgtgggtgaataattaggcaggtgtccctgcatgattaaacaccaagggaagactgtcttcccgagtctgtgaccagtgccggagttttggtttcatggataaaacacatctcctttgtctctaccagaaaaggaaaggaactgaaattaagagaaggaagagattgacgtgtgtcaccaagattgaaaggagaaagaggttgagggatagtgagacagactggagaagagagtaaagagaggccgcttaccggatttaaaattggtgagatgttccttgggctggttggtctgaggaccagaggttgtaggtggatctttctcatggaacaaagagcaggagaacaggggattgatctcccaagggaggtcccccagtccgagtcatggcaccaaatttcacatgcatctgtgtgaagagaccaccaaacaggctttgtgtgagcaacaaggctgtttatttcacctaggtgcaggcaggctgagtccgaaaagagagtcagggaagggagataggggtggggccattttataggatttgggtaggtaaaggaaaattacagtcagagaggggggttgttctctggctggcaggggttggggggggtcacaaggtgctcagtgggggagcttttgagccaggatgagccaggaaaaggaatttcacaaggtaatgtcatcagttaaggcaggaacaggacattttcacttgttttgttgtggaatgtcatcagttaaggcaggaaccgaccatctggatgtgtacgtgcaggtcacaggggatatgatggtttagctttggttcagaggcctgacaattttatttgcaaggtacctttatatttgaatcagtctctggaaatggtatcctttaggtaacgcagaagtctcttgtctacctctgatccctcctagcaccccaggctttgtctcttgactgtagcatctgtggcctagtagaacacaatctctggacacagtagcaagtacccaggaaaatgtaaattcaagtgctcacctacctcagtggatttgtctttactcctcttttctagtttctgaataattaattcccttaatttcctacaagttcagctatgcattaaagtgatatttttctattttatacagcatttctaggtgtgctataccaggaatactttccctgaaagcccaccctgccattttgcataaattagaaatctactttgccttcctcactcaacactaggtagggtacatttttgttgcgtgccatttaacattctgctaaaaattattttagtttctgcattatattgtattggatggatgtaccattattttgttagagatataagggttttttccaatttttccatgtatatttatttttatgcatacctttttatgtgcatctctgggttctttaggattattcctataaatagaattcctaagtcaaggagcattaactttttaatggtcctgtgttctgctgtcacattgctttaccaaaaaatgatgccaattaatagtcctggtagtggtgtgtgatagtatttcattttaactttcttaacatcaatattttttatttttgttaataggtaagaaatttttctgttgtttacatttgtgttccctaaattacaagtgttaatttatatttcttctactgtgatgtgtttgtttgtgttttttttttccagtttccttgttttgacattgatttttccgtgagtggacagcctgctatgcttgagtcctttaggttaacagagtgaatggtggtccttaagtcaatgtttgagctaaatctcagggctatcacaggaataccttcagggtccttaaatatctctcaagcccctgcatatggcagaaaccgtgctgacttctttttgacttaatatcattgcagtaactgagtgaaaaaactgaggttctactaccattatattaccactgaagaaaatgaggcttagagtccataaataacatgttcaagtaattgaatggggattttgaaatcatatcttcctacttaagagattcctacttttgatagtcttgagcagacaattttccctctgtctccacagatcaagtagttgaagttttgttagctatggagtctatatatttgagactcaggagaggagttgcaaaatgggacaaaaaggaagcaagtaagtagttgctgcagagtgtaaaacttttacatggaatttgctcttatgctctataagtaatgataggaaaatgagccccataggagatgacaccactgtgtatggccatgcaggttgtacatacttgagggggagccatccacatccagtatggtgtgaatggcatctttgggaattgtgcagagctacactggcataatcagatccagtaacttcttcatattgatttaatttttataatcacaagtagttttcagacacaggtcagtataaactagaaatagaataaatgatgtcagaatgaaaaccttctgaacttgctttgtttttaatcatcaaaacaattaatacaataatgtaatgcatcaagggtcattgtcccagaaagcatgaaataatattaaggacaagaaatttaaagcaagattgtacctataaaaatacaggtacaacactctatgttggtgtgtataaagacctctcatgcaccaaaaaagagtaagacattttattgcaaatgccgggcaaatacagtacagactccctagcatttttaacacaggtaacagagttacctggtgagccagtgaatagtaaaatactcaaacggataaatgggaaagtggccatggggttagacatgaacattttataggaagaagggattttagaaagtgccctgtcctgtatttggcagctgtgattacttagtcaaagttactcagcatgaatgtaggggaagaaatagaggtttctgcagacgaccctaattgagattaccggctgaggttctcttaggttgctgaaaataggagacaggattatccaggtatcatcgtgtttggctttcagttaacctgctttgctcccacttcacctgaatttctaaatatctccatagtcagtgttttacacacctcagtcaataggttttaggttgccatttcttttcagggaagaaatgtattatagtactagaaagaacactatattcagagccagaagattagagttgagctctttcatgagcaaaccagctgtttcttcatctgtagcatttaggctttgaattaattgatgactaatacgattttcttgtttaaaacactatatctatacatactttttaaatgagtattctcttgaattgtgacttgtgtgaattttttaaagaaatatcaaaaaggcttttacataagctcaaagtagaaaaatcagcacacacacaaatgtatacatacttatttctgatgttatccctaaacattcttttacatatcctgtaaatggctattacatttggaatagtaaatgaaatggtttcttatctaagccaaagagctaaaggctgtgtcttgcacatacagagcaatttcataatcagaggtctttatcaggactggcaaaactggtacagaaaatgcaagaaatttccttttctttggaataagcttagataattacctcctgctaaagtgctaaagcaattattttcttgctcatgcaaacacggattgttcaaggtttgttcctgtcttagagttacagaaaaagcaaattaatgggcaattctgatactattgaacaaattcaggggctatccctgaggatgcggtctgaagccttcattattacatttgggatcttcactagtgtgtgcatgtcccatagagcctctggatgcagttttgcaaatttcaggtatagctgtagtttgtcaaatagctattagtttctatttagaagcaagctgagtttaactttacattctttttgcttatttttcctccactagctctggcaacctcgtttggggctatactgactaaacttttgaaataatatttcctagaacagcaaatacaggatttgaatttttcaaaagaaagttcaggaagcaaacaaaaataaaaatggacatgttttagcattgatttctgaatattacttaaaggtcacactttctccctttcctctgcctcaaagtaatttgagataaacttcctggatatctattctgagttagatttggataggtagggcttctaggtctggggaaattatgtcagatccttctttacaattctacttctgggtctgcctctcctactccaaggaacgtatctacatgtacaccttctttgaaagcatcctaggcctggcctgttggtcctgtactgtcccctgtcatgtttccttcactggattttaggtagtgaacagtgctgtgcttgtaaactagctctcaaaaacaaaaaataatactgatatgtagcctttgtgaacttccatgtataaatactcctactctggtcattttcactttcaagttatcaacatgaggtcactgtagatggaggtgggaagagaggtacacagtcagctctcagaaactagtaagagctggttccagcacatcatatgtatccttcttggcagaaacctctggcttcagtcttagatgtctctatccactgcccctaatctatttctgtttgtctttaattttatgaattatatttataagtgtactgaatcctcttttggttggctatttagttccaagtcagattctacagttggcatagtcactaggttcctctgattatggacaccagctttctcatgtgcctgtttatatcacatcagctgtagtcaccagcataatgtaggcctggtattccttcttgttcctaagcacatggctatctgctaaatttttacgttatatctcagaaaagccacctgttttaagctcactctcaggacagacaatagacagatcctgatcttcatccatgctgaggccttgatccattcagaatataaacttcatccatttatttgatgactgaatccttcaggagctgaagggcaagggaggttgtattaatcagtgctctccagataaatagaaccaaccaaagactagatatacagagtagatcaatagatagacagatagaaatagatacatttattataagaaattggcttatgtgactatggaggctaaggtccgcagtctgaaagcatgagaaccaggagagtcaatgacatatatttcagttccagtctaaaggcagtagaaaactgatgctcaaaggcacgcaagcagagaggaaattctttctttctcagcaattttttttctttttctattcaggccttcaacagattgaatgaggccagcccacctttggcagggcaatctactttaatcagtctactggttcaaatgttaatcttatccagaaacatcctcacagacacacccagaataatgtttaaccaaatatctgggcattccatgtcccagtcaagttgacacataaaattaataatcacagagtgtgatcttgagaatctcatgcttgtgattttacagtattaaaattatattgagcattatgaaaacataacagatgtcatatagatggatgttttacttttgccatgctagaggagtggagtgagagctcttgtggagaacaggttcagattttgaccccacaaaaacagttgtcttcaagcgtaaataggtttaatgtgttccgatgtatgtgtattactttatattgattgttttcagatatgtctttacactgatgagtatcaggtgtgccacacatagcctatcactgggatatagacttccatatagtactgagggggactcattcgggtccccaggggcttttctgtttccatggatatgtagacatcttcagctactaactctctttttcacatcctcttgctgcaggtccatacccatatccttattcctgggttagccattcatttgcttcacattatattgaatgcattcaattaagtagatattaagatgacttttaggctttctgaggaaggatcaatagccgtctcctacccaaccaagcttagctgcattttgtcaatggcatattgaaaaaaaataattacactgttttttactgtctacaaccttcaggtagtggatagaatgctgggcttgtagctaacagcagcagcaacaataacaaaagtggcacccttctcagtttcactatcccatcaccatgtggtcttgttcaggccactgaactctgaaccttgttctctcaatagaaaatgaggaggctgagcttgaacttggagagctaagcactttcttgttgcatctctgaatggaagcttgcatagcagggcttttcaggtaaagatgaaacaggggtgggagtgggtaggatgtggctggttagaaagtagaaagtgatttttgagatgatacttcctgacagtcacccacacagataggattgccagatttaacacataaaattatagaatgaccatttaaatttgaattttagataaacaatgaataatctttagtataagtatgtcccaagcaatatcagagacacatttatatcaaaactatacattatttacctgaaattcatatttaacttagtatcctgtactttatctggcaaccctaaataacagtagataacctattctatctcaacaggttgagctgagcaagtagggcatcttagtgaaaaatagaacatcagtttataaagacagaggctgggtagtttgctacccatgcagcatgggataaaaaaggtgttagtttttctttttttgcacaggttgcaatatcacttctatgatttaaaaaattgtgtgacattttaatactgacataagaagtcatcaggtgaatccttgaatagacctgaagatgctacatagagttatagatataaaagttaggttaccagaagaagaaaaagaagaaagagaagcctgtgaggctttttatttaagacagaaaaatgctaaaattgtgtctggcttaggagtggagttgaataactttgtagtttgtgtattaaaatggataaataaaactaatagaagaattttaaagttttagtagtaataagtgtgacatttaattagggtgctgttctcagtatgttttaatcttcagctgcttgaaaaaatgatggtcatgcaccatttagtaggtgaagcctatgaactagagaacataagccatatactggtgtattgcaactgctgacatttccctcgtcaacccatgggtccagtgggccttattactgatggcaaggaagagatgcctaaactcttgacttgcctgggtacaaaagtacaacttacttgcctgggtaatgcacatccagggtccatatacacctgtctgccccatatgctgagagattatcacatattttaattctctcattttgaatgaatattctcacttatctaaggaggacacacatgttcccttctcttccacatttctttgaaaatgaaccatgcataatgtataaactcttggataacaaatacctgtttgtgggatgactgcgttttcattcatttgaaactgtttacttagcacttacttcagccttgtcatgatgctagtgaaaggaaaaaaaaattcaacttaatacaatctcatgatgcagtatatatgttaattaagagagaaagcacagggcactgaaggactactgtggagagcaaccaacctacggcgggggatgcagcagaaaggtttcctgtggtggcaatctctgaattaagactggggaaatagttggagaattacacagaggaagagggcaggctgagtaggcagacactagcattctagatagagttatcaacatgtgctaaggtttgagaagaaagagaacacagcacttacaggggatttcaaggagttcaactacctgggatagtgggcaaaaaaagccagcagtggcaagggatgagaagcagggggaatagactgtgatggaattgaatgtcatgctcaggaggttagaaattcctgcgtatggtaggaagatattggagtacttacaaagatttgtgttttaaaatgatcactctgggccaggcggggtggctcacggctgtaatcccagcactttgggaggctgaggcaggtggatcacgaggtcagatgttcaagaccagcctggccaacattgtgaaaccccgtctctactaaaaatacaaaaaattagccaggcatggtggcaggcgcctataatcctagctactcagaggccgaggcaggagaattgcttgaacctgggtggtggaggttgcagtgagccgagatcacaccactgcacaccagactggatgacagtgcgagactccatatcaaaaaaaaaaaaaaaaaaagataactctggctgcagtgttcagtatggaaggagggccacattggaggcagggagacaagcttaaaagctgtgccaataatctaggagagtgattatggttgcacgaatttggcaagcagtagtgggcatagagagaaatggacagattcatggtttactgagaagaaaaattatacaattttgtgtttaatgtaaaatgattttagaaaaataaaaataatatctctatactatagatctcaatttgtacatacatatgtacatatttgcatcttgagaaactgggagaatttgggatgtaatttaccaagccagagaaattcacagagaaccatgagagaatagatgggtttgcaacaggccagatgagtacctgatgagttatgctttcatcatatgaattttaggactttattacatgcctcagttaaaaaaatctcatgaacagttgtatatatgggtctgagtttcagcagagacatctaggctatataattctggaggttatcagcatataggtggtaagtgagtcttggaagtggattgaatcatccacggaaaatgtttaacattaagaagagaagcacgctaagagtggagcttctgcctgtctgccttaaaagaataggcagagccgcttgattggagaccaagaaagagcatggaacactgagggaagaaaatcaggagagcgtagtgtcatagaagacaccaagagggagaattttaacaaagaagagagacaaatcaaaaatatcatgtggacttgaaagatcaagaatagaattaagaagcattttattggattcaataaaaggagatcttggtggctggatacaggcagttttagtagtttggggatggtgtgagatgcaagaaattgacaaatgtgtgggaggagagtaagtggaagtaactagtacaggaaaggtcaagaacattcattttaatatccgtaagacttggatagggtaagtgctggtgggaagaaaacagtaagcagaagagtgttaaagaagcaggaagggaagggcatgagtgtgagaccaagtcctctgaggaagggagagctgtggtcccagacaaaggtggggccagcacctctcaggaaaaatagtgcagtttaaggcgctctctctctgaataggagaggcctagtgttgagaatgacagattaggagatggagtgggaggtgtgaggaaagggagaacatttgaaattgccaatttgagactgggagagagggctgcctagagaaacacaggaagtttgccaggcatttgtgagtgcccagtaaatgtgggagccataaactggaattgaaatcaatccaagcagttgtgtgattttctccattagagcccagaagcactgatgtaggggctaagaacacaggcagtgaaatttatctaatgctggggtgtggcaggcagtgtgacaaatggcaaagcgttcctggccagacaggcagatttgaggggacacagggaagaggaacttcacatactcaaatgaggactgaggactaaaagacatggagaactgagaacaaaggattgagggccgtgggaattgaggcacatggagaagaggaccttcacgtcttaaaacactcacttaggaattgtggtttgcaaagacaggtgtatgccaagactttcttaagaaatttgtaaaactaggaataaactagttataaattatgacgatccatcttgtttgaaacattacatgactgtagaaaaatggtggactcctacataaaaatgaaaattccataatgtccaagggaatttattatacataaacatcttttaggaggatacagttgtagcattttcataacaaaggggtgcatatttcaagaaatgggaaatggagttttaaagtttatacaaaataaatactgaaagtcagcaaacaaattataaatcatatgtaacttgaattttatcatctacagattttagttgtgagcataaatatttattgggacgtatggagttggacaaaaatagggttacatatggcacatgaaaaataggaaagaagcatattgacaatattaaaatatattaatagcaatccacctctgaaacagtttcactaaagtcacaattatgcctattccaggttactattaaatctcttgtacaggaacagtatagaagtcttagttggggtgtataattactattaaaaatatttcaactgttaattttttattatactttaagttctgggatacatgggcaaaatgtacaggtttgttacataggtacacatgtgccatggtggtttgctgcacccatcaacccgtcatctacattaggtatttctgctaatgctatcccttcccttaccccctacctactgacaggccccggtgtgtgatgttcccctccctgtgtgcatatgttctcattgttcaactcccacttatgagtaagaacataaggtgttttgttttctgttcctgtgttagtttgctaagaatgatggtttccagcttcatccatgtcctgcaaagagatgaatgaattattttttatagctgcatggtattccatggtgtatatgtgccacattttctttatccagtctaacatcgatgggcatttgggttcgttccaagtctttgctattgtgaatagtgctgcagtaaacatatgtgtagatgtgtctttatagcagaatgatttataatcctttgggtatatacccagtagtgggattgctgggtcaaatggtacttctcattttagatccttgaggaattccacactgtcttccacaatggttgaattaatttacatcaactgttagtttttaaaagtagaggatctacattgcttaaatctgagagcatcactaggacaagccactcatattataatgggctacttttgacatttccacttagttttcccttcatattgcagaaaacattgttttcacacatttagaatgtttgtaggacaaaaaagtgaaatatagcttgccagtcattcaaaccataaatgtaaatctagctgaattatattttaattcaaattgctattgaatgccacttgaaggtccatatttaaaaatggctactgctcatgttgagcaacactgtttcataaatgccttcatggttctaatgttgaactcctttaagttcagttagagctttacaaatataaccatgtgaccggaaattatttttaagcagttaaaaaataaaatagaaagtagacgtagggcatatgctagtagttggtgtcttattctgtgagtggtgctgcaaaaattttgactttcccaaaatatctcctgttctgctgtgatgtgtcttctgttctgttttatatgattcataatctgtatcatagtagtaaactttctggggtattctgaggggatgtcttttggagcccattgacaaaatgctaccagaagggaggaagatcttaagttcttctataagctttcattcttatatgtctatgcaggggaacacatatgcaggtatggacacctcctcatcttgcttgggcatagaaaagggagaaggtggtagaagcggaaaggaaatttgcatctgttgtagagggaggagatactggcaaatatgtataagaaataatgaaaaggatgatgagcattttgtaaatgacgagttaatgggtgcagcacaccaacatggcacatgtatacatatgtaacaaacctgcacgttgtgcacatgtaccctagaacttacagtataataaaatatatataaaaaataataataataaataaataaaagattgtgcttctactatatgtaaaatcttaccaagaaaaactcatatacatgacattaaactctaaaaaatgaaaaaaaaaatgaaaagggagaaacctggaaaaaggaggagtgacgagatttaattttggctattctacagttttgcctggagctagcccctgtcctttcatacattaggagaaaataatgtaaaatcttgggagccgaacatgacttaataattatgtagactttgaagtttagagatataacatctgttttgggctacacaattatctatattacagataaggaccttgaaatttaaactaagtcactttcccagatctcataggacagtacagggatttgaactcatattttctaatcttagaaattacacactttgtactacattacaaggtcctctaaaagaaatcccttcctgtagcataaaatacaaatgttaatttcatttaattcttccttcctactgttatttcttcttcttccagctctctttaagtcttttatattgtggggttaattgcattttacttagcataccatttttgcaaatgcttattttaaatttaaaaagagaggaagagaggagagaaaagaagggaagggaatttttcagtgaaacacctggaaattcctaagaacatttccagttacacataggtttgaagttttgaagtttttattttaaataaaagttttctagggtgtaaagcccatgttttattcttagctttgccactgagtcattctctgcccttggacacctcacctaacacattgtaacctagtaagatttagcgtttttcaaaactagatggtgtttgaaaagagaaatcttcagttttcctccttgtgatgttcctgttttcttaaagtacttgagatcctgggtgtcctgctgtgacttgttcaagcgtaatttgtaacagaaatgattgaaaggtttctagatttagcatgatctcttcaaaagggatctttaaagttgaagtatggctaacctattattttcttttctattgccttatactgggttatccttcaacaaggtaacatgcaaccatccactgcctgtaaccctggcttcctgtgcagcaaagagaatgtgactgccagacttttcccctgaactttgcttcatgagtgaaaacaggattaaattatagtttccatttttaagattcttaaataatttagtatactttatggttattttcctacttacattcctcatcctttatgagtagccctctcatttgttccctcatatctttaggaatgtgtgcacttagataattagacattcacagttacgaaaactaagatcacaaaggttggtcattaagtttgattttcataaagcttctttctaattccatgtgaactttgcaacacagttatcttttttaaaatttttgatttatgtgtgtacatagtaggtgtatatacttatgaggtacatgagatattttgatacaggcatgcaatacataataaactgtccatggaaaatgggatatccatccactcaagtatttatcttctgtgttacacacaatccaattctactttttaagctattttaaaatgtacaattaaattattactgactatagtcaccctgttatgctgtcaaacactaggttttattcattctttgtaactaattattttgtatctgttaaccatccccatctctccccaaccacttcactatccttcccagccttcctatgcggataactatccttctactcctatctccaagagttcagttgttttgacgtttagatctcacaaataagtgagaacatgtgatatttgtctttctgtgcctggcttatttcacttaatataatgatctctagttccatccatgttgttgcaaatgacaggatctcattctttttttatggctgaatagtattattgtgtatatgtaccacattttctttgttcattcatctgtcgatatacgtttaggttgcttccagatcttcactactgagaatagtgctgcaacaaatatgggagtgcagatatctttttgatatactgattttctttctgttgtgtgtatatatagcagtgagattgctgtatcatatgatagctcaattttttaattttttgagcaaccttgaaactgttttccatattggttatactaatttacattcccaccaacagtgtatgagggttcccttttctccacatcctcgcctgtcttattgcctgccttttggatataagctgttttaactgggatgagatgattgtagttttgatttgcatttctctgatgatcagtgatggtgagcaccttttcatatgcctgtttgccatttgtgttttcttttgagaaatatctactctaatcttttgcccaatagttattattaatatttattcattgaatattttaattgttgttttagttatgatacaaattttgcaaatatttgaatacttaataaaaagttttattttattggaatatatgaaaagattcattgatagattaagttagacctcagaaggttgtaggtgtggatttaaaggtaaaacttctgattttatttctgtggaagtcaatctttcacatagttttctgagtgacatctataagctaggtgcatggtgagtgatttgaatattctggaaaaccattttctgcttttgaggtactaataatgtagctgaagaagcattacatttatattaaatattagtgagagttgaaggctatattcatataagagctgtcacaaaatagcgtgtgattaactgtcgaatgaaaattacaggtaataaaacattaccctattagctaggaagcaggcctaggtagaagacatgatcctggaactagactctgagggattatgaaagtactttttagaaagttagacatagggaaagccaaggaagcatgaaaataaccagagtaaaggccaagaagtaaaaagaatcagacttgtttaagcagaaaatgctctctagggaaacacataccctctaggttggtcaagtagaatggcttagggaaataaaggagaagctagaaataaggatccaaagaaaactttatggcagaggaatggtatgatcaacatatcgtttatgaaggaaagacaatgtaaaatgtatacaagataaactagatagaagagattcactaagaccagttctgagaaaactgcagtagctatgttagaagataaatgtatgaacaaagccagtgagggtatatatttatttatttagatgttaacataaaaagtataatgtagaaatacttcctaaatatacttaattgagtaaaataataataaagacctaaagaaagatgtatctataatactgaaaagggatttgtttaaataccaaatttactcccttaaaaattagttatttttgtccttgtggtagacagcttataagatggtctccaataatccctgccttgtagcccttctgtaagctgtttccctggagggtaggacggacttgcagactctctcctaatgaataaactatggtgaaagtaatggggtgtcacttctgagattaagttacaaaaagattgtggctttcatctcatcctctcttgctctattgctggtttgttctgagggaagctagcacattttgtgacgtccatgtgacaaggaattgatgactctggtcaatagtttaaaaaaagacttcaatgagtgagtgagcttggaagtgtaccatccctaaatccagacatgaaatgacccaattttcagccaacaccttgattgaagccttgtgagagaccctgggccagaggcacccagctaagacattccaggatgcttaacccccaaagaaactatgagctaataaatgtttgttgttttgtcattgagttttggaataagttgttagatagcaatagacaactaatacattattatagtgttacatattcttctacctctaccaggacacctgactgaatactataaaggatgcttctactataatacaacaaaatttaagctaaagtatacttgtcagtttattagaatcactggagtcatggaaaataagaggcagttccagagataaaataaactaaagcctgtaggcagaaagcttaccctaggagaaatgatagctaattcctgggaacaggagaccaagcctggggttcactgcaacgtagcagctaagaagagtttcttatgtagggttagagaagttcaaggtcaataatgcccctgaaaagtatacccaatttgagcttttaggctcttcctctgaaaaaattagataaaatatttgaacacataattaaaataaaaacaatgacaacaaaggaaacaggcaaccacagagagtaatggagagatattaccaaggactttagttattggaattgtctggaaaagtgtacaagttaagcatctatggaatttgtaaagaaaaaattgcatataaaatgagcaaataataagtgatcattaaaaataatcagtcttaaaaaaggatgaaaaagaatatttaaaaatataatcttttctacactttttcttccccctcatccctgtcctcgtatctcttctagtcatgctattgcttttagttctcttaattaaatttgaaattcatttaatatattaagcctctatttcattggtgtgtcaatgttagacaacgttactcgcattttcatgatgtaagttgatggatttagtggccttatgtaatctctccttgtcccctctaattctcaaatgctgattaccatattattatatttgtactgtcatggatattattatttacattccattttgttactatattattcatcttccttggtatgcttatagatgacatctagaaatagaaacaatgatcagcatatataaaatcacaattacatagatattgactgcaaagcaaaagtgaatttcaactctttaaaggaaggtggcatgatcacttttctgtgctgctcagaaagaaacagctaacaaaaatgagtggagatggggagagagaagatgggagggtacgtatagtatgttataattcctctatttcattcatttgaagatgtgctttttgtttttaacattgggacatctctgagtttggaatgcatcttataatcattgttggccaggcagtggtaatgatctgctcacgtgaaaacttgaccatagctgctcgtaatatcatcatttaaatggaatgatgcacaatgccagtactacatacattgagtttaattgccatttaaaatatcaggaagagtacattatgattcagcaatagtacagttattgtatacatagaaaggaaagagagcagtgtgatatgtgctaaaatgcatacataatctagaagagttactgcaaagagtataaaataaaaattctaaataataggaaagcatatgccatagtttaattaggaactttttttttcttagtgattataatagtgcatcatctaattaatagatttctagggtcaatgaaatgtaaattttaaatgtgtatattataatttgccttttccttttcagtaaaatatttcagctttctcgttttgctattcattatagggaattcactttattctcgatttttgtacagaaccctaatctaatttgctttgcagatttgctgtgatacaagcagcagctgttccagccctttcatccccataccaattacctctttctagagtaacaagttttggctagacacatttgcaacttctcttgcagctagggatgacaacatgactaggttctccgcatgtgatgtgggcagaagtgatagaataaaatgaaatccccccaacctctttccctttaccttctttatcccttccctgaggctggagtgtggatgtggtgggaagccatctttaacaatgcacccaaggaccaaaatacagaggttgtgaaataagatggaaagaaaaagccccaacatcaatgagttgtcctactagcattggattatctatggttactgatacatgaggaaaaaaatatatattctttaagtcagtatatattaagggacaatataattgctcttttagcatccctttgcctttttgtgtgtgtgaagtaggtcacatacttcacacaaaagtactcccatattatctttattattgtctataagaatctacagtgatgctccctctcttcattgctgatgtttataaaattttcctaagaactaacttatttgttcatttttctctctctaatatttctattttatattatatcatttcttcccctatttttattatttttagttcgtttacttactttggttttcattagcttactgtttttctggtttcctaagtggagaaattggaacattgattttacttgcctttcttcatttaaagctataagcttctctgtaagaactgctttatctatattccatatattttatattttgttttccttatcattcagttcaaatatttattgaaatttacctttgatttcttcgactcatggattatttgaagtattttggtttgtttccaaaaacttgaggattttctacataactaatgttacttcagttttaatattattatgtctagaatgtatactctgatttacattctttggtatttattgagacttgatctatgtaggtcatggtttctcaaacttcgcatagacatatttgactggatattactttgttgtgggagttattctgtatattttaggatagctagcaaagtctctactagatctcagtttctcccctatagttgcaataatcaaaaaatatcttgagacattaccaaatgttttcagggaggcaaaattgcctctagttgaaaaatgctgatctagaaaaatgtcccatgcgcacttaaaaagaatgcataatttacagtgattgggtgtgatgttctataaatatcagttagattcagctggttattaatgttgttcaaatcatacaaatctttactcattcttttgtacttaaaaaatcaattattgataaggtgtcttaaaaatttccaattatgatcacacatttttgtgtttttgtctttagttctaacaatttttgaatcacatatttcaaagcttgttattagttgcatatacatttatcattgttattttatgttaaaattgatggttttcccattataaaatttacctgtcttgatacttttcctcaaagtctagttatattaatatacccacttcaattttcttatgcttagtgttatcatggtattttttcacaccttttctctttcagtttactcatgcttttgttttcaaataatttcctttaaacatagtttcatcttgaatttttaaaatctaacctgacattctttatttggagtatttattttgtttgtatgtaatgcaattattgatgtgttacgtttctcatcttgatttttctccctcttttcttgtttctcatcttgagtatattgcatacatttttaggattgcattttatctcatgcatgtattttcagctataacttttcatattattttagatagtggttctagatattacactaggtattattaagctagcacacatgaatatgggtatatattttttgatgtatcttgcatcaacataattttctttatcttctttctgctctgtgtgctcgttttctattttttcgtattattttacaactccataaaacattgtttatatttttgttttgtacagttcatgtttatgttgctttaaataaattcagaaattattatacagatattatacctacacacacactaatttttaaataattatatctattgactttctctggtcagattttttttctttttaatttctaattttacttgtttcttttcctctttgtttcatttggatacttttctttttattgatcagccctcacattcattgatactgtcttctgctttttccagtctgctataagttcgttcaatgaatttataattttcaatcaataactttttacatgcaacatttctttttttttgtttttttgagacagtttcactcttgttgctgaggccacagtgcagtggcacgatcttggctcactgcaacctccatctcctgggttcaagtgattcttctgcctcagcctcctgagtagctgggattagaggcacctgtcaccatgcctggctaattttgtatttttagtagagacgggtttttaccatgttgcccaggctggtctggaactccttacctcaggtgatctacccacatcggcctcccatacatgcaacatttctatttagatctttatgcagttatcatgtgtttgctgaaatttccaatcttcctacttattatgcaccatttttactttattctttaacatttttattgtggttattttaacttatttgtttgatattccaacatttgtgctatctctagctttgcttctattgattattttctctcttgttcattgttcgtatattttgcgttttgtttgcttgtaatctttcaattttttgtgaaacattttgtaaaaaaaggatagtagaagctgaaggaagtaacatttgcttctaagtagaggcaggcacagttttaatcagaccatgagagcaaaggttgggtcaatatactgtagttgatttgggtttgtgctttatttcaacattagcttaatttagttttctgctatcttcaaatgtttggagaattgaatcaggactattccttctgtagggcttggggtcagagcactaccaatactcaagagatctgcctatacttcaaagctgaaccaccagcttttgcaactctgggatatatctagtttacagtctgtttgtcagttttgtgggtcctgaagcattgtttttgcctttcagacatacccattgctttctgcatcttggaatgtctctttcagacctgttttctatctcccagtctttgcagggctgtggctctatactctataaagatacagaactctttgaagagatttagctttagctttcccaattagccttctgtctttagtaattgagagccaaattataatggggtgtgtgtgtgtgtgtgtgtgtgtgtgtgtgtgtgtgtgtgtgtctgtttgtatgtgatctcttcaacccctctaaccttccttagatgatgtatttccctgcatttgcttccctgctgatatggtttggctctgtatccccaccaaaacctcatcttgtagctcccataattcccacatgttgtgagagggacccggtgggacatggttgagtaatgggagtgagggtgagggtgggtctttactgtagtgttctcttgatagtgaataagtctcatgaatctgatggttttaaaaatgggagtttccctacacaagctctctctttgcctgccaccattcatgtaagatgtgacttgttcctccttgccttctgccatgattgtgaggcctccccagctatgtggacctataagtccattaaacctcttttttgtaaattacccagtctcaggtgtatctttatcagcagcatgaaaatgaactaatatagtaaattggtaccagtagagtggggtgctgctgaaacaatacctgaaaatgcaaaagtgactttggaactgggtaacaggcagagattggaacaatttggagggctcagaagaagacaggaaaatgtgggaaagattggaacttcctagagacttgttgaatgactttgaccaaaatgctgatagtgatatagacgatgaaattcaagctgaggtgatctcagatggagaggaggaacttgttggtaactggagcaaaggtaactcttgttaagttttagcaaagagactggtggtattttgcccctgccctagagatttgtggaaagttggatttgagagagatgatttagggtatctggtggaaaaaattcctaagcagcaaggcattcaagaggtgacttgggtgctgttaaaggcattcagttttgaaagggaagcagagcataaaagtttggaaaatttgcagcctgacaatctgatagaaaagaaaatctcattttctgaggagaattcaagccggctgcagaaatttgcacaagtaatgaggagccaaatgttaatccccaagacaatgaggaaaatgtttacaaggcatgtcagaggtcttcaccgcagccccttccatcacaggcccggaggcctaggaggaaaaagtggtttcatggggtgggcccagggttccatgctgtgtgcagcctagggacttggtgccctgcaacccagctgctccagccatggccgaaaggggccaatgtagaggttgggtgtggcttcaaagggtgcaagccccaggtcttggcagcttccatttggtgttgagcctgtgagtgcactgaagtcaagaattggggtttgggaacctctgactagatttcagaagatgtatggaaatgcctggatgcccaggcagaagtttgctgcaggggcagggccctcatggataacctctgccagggcagtgcgaaagggcaatgtggggttggagcacccacacagagtcccttctggggcactgcctagtggagctgtgagaagagggccaccgtcctctagaccccagaatggtaaatccactgacagcttgcaccatgcccctgacattcaatgccacagacattcaatgccagcctgtgagggcagacaggtgggaggctataccctgcaaagccacaggggtggagctgcccaaggccatgggaacccacctcttgcatcagcatgacctggatgtgaaatgtgagagtcaaaggagatcattttggagctttaagatttgactgccctgctggggctgtaaagatttgactttaagatttgactagcccctttgttttggccaacttctcccatttggaatggctatatttaccaaatgcaagactttggactgtggacttttgagtaaatgctgaaatgagttaaggctttggaggactgttgggaaggcatgattggttttgaaatgagaagacatgagatttgggatacgccagggacagaatgatatggtttggctctctgtccccacccaaatctcatcttgtaggtcccataattcccacgtgttatgggagggacctggtgggagatggttgtatcctggcagcagatctttcctgtggtgctctcgtgattgagaataaatctcacaagacctgatggttttaaaagtgggagtttccctgcacaagccctctctttgcctgccaccatccatgtaagatgtgacttgctcctccatatcttctgccatgattgtgaggcctcgcaagccatgtgaaactgtaagtctgttaaacctttttttttttttgtaaattgcccagtctttatcaacagcatgaaaaaggactaatatacctgcctaacacaacctcctctgaagaagatttgcacttgacagaggccatggacatttcaatggggctatctcttagctctcattctttgacaccctccctagttttggtgtattactccctatatttggtgaatactcatgagcaacagttgacagatgggtgcagttttggtttgtgggtgggtttcttctaaattcaagtctaccatgccaacctacatatggctgttaacaattcataaaatatgtgtctgatatctaacatattttttcttccctcttctcactctaatggcatatttcttcctcagcaggcctgtgtctcttctcttctatgaaggacctggcacttcctgattaaaactttgcttgggtctcattatttctttaatgctttggttagttttaagagctgtaatttttgcatcttacctggatttttgttgtttttatcattaaggtgggagtgacagttttttgtaactttctcatttaattagaaaatgaactccatttattattattattattaaattgaagtgcctctattatgcatgagatcgcttgcataggtgcaaatgataccaataacatagaagtcaaacaattaccactccctcttctcactggaaaatgcttataggaaattagatggtttttgttctctgagtttagcaaactgggtcttatagtacttcaaacatgaaggatactggagcagggcatcacaatgactcatgctctccttctggtttcttgaaattcaaatttggaaacatttggcagaaatattttggtgctctgaactggtggtggtgtatatagggccctaattgtcactgactcattccacaaaagattttttttcccttcattctatttcctacttctctaacttctaagaaatatttttgttacttagggaacacttgtaatttaatttattgctcttattttaactttacaaattaagacttctttcatattcatggccacactttttcagagattgaacaatgtaattatgttactaatctttttctttccaaacttcatatatttacttattataatactttctttttaatcagtgccgttatctgtttaattactttcactattacttgaatacaatccagattatttacataagatttctagtatacttagccaaacatactcaagcacagttgtgcatgtttgtatattaatatatatacataccttttaacagtctttctttatctacataaaactttctgtgttacatttctataatctagactgaaacagaacagacagttttgtaacttgtttctcccattcaacattcatatactcctacatatattgatagtctatttttgtttctgttgtgggaattgtcatatatatagacataacttcaatagatcatcatggcaatatgatcaggtaccttgccctgattgaattctgcctggacaaggattaagtagcaatttgacacacatttgttttcctttggtgcatacagatctctcattcttggaataaagaatgagtgtcttcattgtattttatttttattcttaactattttcttgcaaaatcttcacggtaattcccatttctagaatctcttttattgtttttatattgatgagtagtcttcatataatgaaaaataaaattgcatagatataaggatgagctgatttctttttttttaatatcatgggtacattacagtttgattgtacagtgttggatgggacccagtggacactctgctgcacagctgatttatacttctaggttagctaagcacagatggggttagagatactgtgtatcattgccaaacaaaagtaaatcatgtatggaagtcctgattaggttaaacttgaaacaacatggagagacatccaagcttttggaattggcttcttcaacaaatgctcctttgacattgaaaataagctatgacacctaaattctagacctggacaatagagcctccttccttgggccagcaagttagatatttctgtatagtacaaacatacacaaatatagaaaacatatacaaaaacaagatcaaaaaaggaatacttcggacacttgagagctgccattcagcactggcacaacatgacctatagtcttaaacatctatttttgtggctgactctatttgggccccaaggaaaagcttcatctctttagactcatgttgtagaaatcatagaagactttcaaaatatggtgaaggtttgaagattatgccttcatcaacatgagaaatttacactgctttataacagaaaggcagaaatgtcttttcttattgggaaaaaaagacacattaattgactcatcaaatgaagttccttgcagttactatgactgccataggctttgcagtataatgaagtattatttctcagtagtaatggcagtcctttattttgtttattttcctattctaactcttagttctggaggtattaataaaataatgtgatatttgcaacagttgcatgtaatggctaaataatttttacagtaagaaatcactcatatttactttgaaacttgtatatatgtagatatagaggtaatttaggtgaagtgtaataccattttttcacattggcaatgagatgagcattgaatgaaagaattaagaatagtggtttcattaaaaagtaatgatttaattaaattttcaaaattaaatatgaatattagatgttaagatgaattttaatattcattaattttaatatatatttttattattttgatagttgacttagaatgttttataaaaaatagctggtttaggaaacatgaaaataattttaatttaaaaatttgacaaataacatttgataaaatataatcaattttttatacttttgaaaatacattgtttttaattatttaattcattcccattaatagaacaaaaaccatgttatgccacaattataatgataaaaatcagtgtttctcttgaagtgaaattcaaaaaaattatgtaataatatgtagtaacttatgaattatatttatctgtatttgagtatacatcaaaacattaccagctaaccagggaacattaacacatgtagtaataattaaatgtagtcattgtcaacatttttttcaacttacagttgtataaaaaccatagctgtacacatatttttaagttttgttattatgtaaaggtagattttttgagttagaaggctaaacatcatttatttaataatttagctgattttagatttaaaatatttagatgtttaatggttaaatatttaatgtaaaattgtaaatatttaattatagtatatgagcctcatttggtctctagtcctgtcctgtaaacattaggagtcttcctcctgtttccaaagtattaaatatgaactggttattttatttatagagtcattactaatttcctgtggtatgataatagtattacacagcaaatatctatatgttgtagatatacttatgtaattatttaataggtgaaatatgttcaaaatttgctttaaaatataaccaaattaataatgtttttgtttttattatcttcatggaacactttgagaagtaaaggggtagatacatgctccatttgtaaattagggtttgacaaagaagtccattattccatttagtcaataattttgttctcatctttgcctgaaaatatattttgaaagctctttaaaaagttctagaagcattagaacacatctgatctgaatttcaattttacatttttactattttttttagtttgatcatctttagccatctgaaatctcaattttctcattttaaaacctacagtaatactatcaatactgatctcaatgaactatagtgagaattaaacaaaatagtatattttacttaacacaatgcttgacacagaacaagcacacaataagatgatagctacttaaaagcatcacccagcactagttttgggtaataagaagattatttaaatatgaaagtggttgctttcctttatttatggaaatagattttatggtaatatttaataaaacatttatttttgccaaggacagtcagttaattgtagctttagttaaaagttcatcgtttctttctatttactacgagtttccaaaaggaaagtgagcatttctgcctgggagatggtaaggctgagaaatgctggaattcttgcattggatgtttgtggttgagaacagatcattgtctctttgtgccagggtagtaggtagtggaaaagggggggtaaagatgaatgatactatagtttaaacatctcctccaaaatacatgttgaaatttaattgcctatgtaatggtatggggaggtgtggattttaagaggtgattagatcttgtgcattctattattattactgttttatttttcacgttttactttgaattataaactttcattcgcaaactcttgtcaatgatgtcttctgcttccatgcctacctggcttacttctgccaatctgtctagatacaattcaatgttttgttaaaacaacatttgccaaaggtttccttttgccttttcctctagcatggaaatgaacttgcatttgctgcatacatagccaatgattatccaaagcaaaatgcctaatttttgcattagaattaatgctgttatgggagtgggttagttgatgtgggtgtggcctcttggcaaaggataagtttggcctcatatttctctctgtctcacctgctcacttctcccttccactgttctgccacaggatgaccctcaccagttgctggtgatatgctcttggacttcccagcctccagagcaatgagctaaataaacttctgtttgtttttttttaataaattacttattctgttatagcagcagaaaattgaccaagatagatgggaagagaaagagagaaaagaagaagagacaaggataatagaaaatataaagcaaatgctggagctttttactttaaaaagtcaaaaaataaggggaaatgttctaatttttaaaataataaaagtcttcaaactatacaatgtgagtcgtttttagcatttgagatagaaatggaagatacacaaaacacacaggagaaagctgaaggtcagggagaattagaagacaattgtaaaaattaacagtgatgattttgctgcccatggtctggaaatgtccttcatggtaccactgagagtcagagatggtagattttatataaattaattaacagaccaactgataagttgatagctctcatgattcttttggttgcatgatataatattaaatgaacacaaaaagtaatccaaatactcttagaaaaattacagtgggttaggtcgctcattttgaatgtccactgggtgagacttctggatcttcttacatatgacactgtattgtcagctagtgttagggacttcagaactttgggatgactaaaataatactcaaatatgttcagcatagtctaaagtcttaatattatgtgggctgtgtcctctttgtctctctgacttaaaaccttgcggttacttttagcaccattctttccactttatattctaatacacataaggttctttcatcatacctatttctcctttgcaatttcccaagaaaactctagcctatttattcttatgctgacagttttttccagtcccaaattccatatgacataggagaagcaggaaatgctaccaaagcaagaaaacaacaaaaaatatgttactgtgcagaccaaatgcccatgagagagagtgaattctattgtaaggttccattgtatatattctgagggtgagcaagtagagacagggttgaaatcttgtttaaagcagaccttctatagcaggtttgcaggttaacaagtaggagaagataggtcttaagtaagtaataagtggctcttccctctgggaataggagctgcaaagaggcaattcccataacaatttatagggagaaatatatcaaaggagctaaagaattacccctgagagccattaaatttgagcatgatggcatctgttcctgtgatgtatagcttatgtgttacgcatgtatttttgctttggatgatcattggctaggtatgctgcaagtgcaagttcatttccatgctagaggaaaaggcaaaaagaaatctttggtaaatattcttttattgaaacagttgttcctagacaggttggcagaagcaagccatgtaggcatgggagcagaagaaatcattgacaagagtttgtgaatgaaagtttgtaactcaaagtaaaaagtaaaaaaagaaaacagtaacaacaatagaatgcacaagcaggaaacttatccaccatgggaattttagcctagttataggattttctcattggagtatgtggagactgaagaatctgtgtccttttctccttaattcacaaaaggagacccaaggcttcaccagatgggaagaattttgttaataccctggaaagaaaagactttccatgacaactcttctgtgatgggctaaaaggtagcagcaggtgggcctgacatggctgtgaggcttttcatttcatgtctagcagagggaaaaccagtattctcttctttacatcatttcttataactgccttcagcagatacgtaaaacatctaatcggatatggcctgtattctagcttagattatttttccagttttacttttctttcacgaactttgaattttctcattcatcagtgcacatttcaccaactcctgattcatcagttcttgaactacttagattaacatcttgaactttgacatttcactttatattatttgtgttaggtcacccatcttcagacagtaggctgcgtagccatgtaagaggctgcctctggtcactgacccttagttctctgagctgctagcatgggcacaaggtcatgaaattctgggcaaaaccctgttccatgggacactgctggctggatccacagtgccactcagcttcctctcatctgatattgagaagtaatatagaagtaaaaacagaaactcaccatgagtaaatcctattacagaggcacaaactaagtgctatgggaatccaatgaataaggcaaataaattggtttatttttattaagccctctgaaaaatctctcatcatatccaatgagcaagatggggaaaaatgggtgaaaagaagtaaagtgcttttatatctagtggacagctatgctcaaagtgaccaaagtatgttgatcaatgaagtgattaatggagtgaaattctgaatcatgagatttagtaacaagcaaagtaaaataaaacaagtggtggatttgacaatgactcatacttaggaaaacaagagcagcagtagcagttaccatttatctgatgcttaaactgtactggagctttgcatatattatctcagttaatcctatcaagaatctgtgagctagtgtattcttattttacaggttcaggaaagtgaaatcacccaggcttgcatagttagggtgacagagccaggattttaatgaaggttggttcacgtggagagctccattactttcattaactcatttcattctcacaacaactgaatgaattagagtctgtcattatctgctttttacaaataagaaaattgaggcagagtttgactcatcatgaaaatatactgttagtcataataataagggataaatatttggtccaatctaatagtaaaagcttagctagaatagaaattaaggcttcaaaaaacacacttgattcattattttgtggatcaggaaagagaagtcctgggttgtagtcctggtttatcatttattagatctatgcccttgggcaagtatgttaaactctgtacctcaatttccttgtctataaagtgtggaaaataataccagcttccatacctcataaagctttggaaggagaaaatgcgacaaggtgtgtgaaattgatttgaaatcgtgaatgttatgcaaatctgtgcttttgttttgttattattttgaagacaactggtagaaagatactcaatatcctgaaaatggtgcaataaaagggtgtttttatgcttatatgaattaaaattatccagaaatatggttttaaagatcaaaggagatagaagtttgcctttgcaatgaaaatgaaaattaaacacacttaaaagccaaacataataagataacatatggggctgaagtttagttgtcccctgaaaattcctagggctttttactctttcaattaaagaaaagaatgaaaataaagcttgtaaacaaggcaacctgcgggtagtcaaagcgcaaatgaatctctcactagacaatttacaagtaaatttttaagagtatattcttttgagtctcagaaatgagtataaatcagtttgttaacagaattacacacccacttacccacactattgtcaggacacaatactcctaaaggaaaataattacaattaatagttagtcttctttagaatcaaagaaaatctaataaaaaagaagtaatataaaaactaattccaatggcagatttttaaaaattaataatttgaaataaaaattgaattacaattttgtggggttttttcctcttaaaatgtagggttttccattaggtttaataattatatttccaagttactgagaagaaaactgacctttctttttttttctgtttgctttaatctttgtacccatcacagagaatgaccaagctttaattcttagaatttacatgatacagtcttgtggatgtttttgtctttagaggtttttataattagacctttcactctgataaagaaattttcaatattgagtagcaaagagaagttctggtgtatttatagctaatactaaggaatagaaacctatgcagcattgattacatgtgccatcttctgaagctgtgacccatgtgggtcaatctcagagttatttttctttcagagatgctaatctaaacaaaggtttcattgtttcttcatttctctacaaaaatataagaaatggagtcatattttacagaaagcttatacaagtttcaggttgtctccaattctctaaaactttaaatctttaaggtacttacagaactgttatgaggaataagtaagattgattgagctggctcatggtaagcacctaataaatatcagctatgtttggtgttagcttagacgattctttccctcatccatgactttctgtgtcctccatttctctccttccctgtccctaaatacaaaatgcccctccaacttaattatgcttaagccagtttgtcctcatcatccatcactgctcattgaagaatattgttccggtatactcccactgtgttttctttcttatacaatctaccagcaaagctatcacctttccatgtcttaacattttcttccaattctgcagtgctgaaatccaaaaaaggaacctggcaattgcagaaaagttcttagagagctgggaagatccaagaatgggcaggtaaacccaggatcctctttggcaaacaaaggaaaagacagaacactcatattttgcatatacacaggattagaaagaggaagttaattttttcctactcaagggggatagggcaggacactgacatttatgaaatgcattttaaatgtcagctgcttaatcctctgataaccaagtgaggctgatattattgtcatcatccttatgttatagataagggattcacataacaataaattgtgaatctgggttgtagctagaaaccttggttctaaataccctactaatacccattaaatctgctaatttccccagtgaagtatgatgattctccacaaagcataggtaaaggaagtttgagttcaattgtgagctttctttcaccaacaagcattaaaaaacgttattgattcaatgcaaagtggtctattttttttaaaagtattgagtggcaactatgcaccaaatattcttctaggtactatagatacagtgatttataaagtcagcacaagtttacatcctaatagggagggcaactaaggaaggaagggagggtaaaagaaagagagagaggagggaagaaagggagagaggaaatgataagagctgtaatagattcagatttactatagatagaaaacctccctgacaaggagaagtttggattttatttcaaaagtgatagatgaatccttattttttttattttcccaaaacatgtaggttctcaactgatatggtttggctgtgtccccatccaaatctcatcttgaattcccacatgctgtgggagggacccggtgggagatggttgaatcatgggggcaggtctttcccgtgctgttcttgtgatggtagatgagtcacatgagatccgatggttttgaaaatgagagtttccctgcacaagctctctttcttttgcctgctgccattcatgtaagatgcgaattgcttctccttgtcttccaccatgattgtgaggcctccccttccatgggaaactgtaagtccatgaaacctttttcttttatgaattgtctagttttgggtatgtctttatcagcagcatgaaaacagactaatatagtaaactggtactaggagtggggtgctcctgaaaagatactcgaaaatatagaagcaactttggaactgagtaacaggccaaggttggaacaatttggagggctcagaagacaggaaaatgtgggaaagtttggaactccctacagactttttgaatggctttgaccaaaatgctgataatgatatggacaatgaaatccaggctgagatggtctcagatggagataaggaacttgttgggaagtggagtaaaagtgactcttgctatgttttagcaaagagacgggcagattttgtccctgctctagagatttgtggaactttgaacttgagagagatgatttagggtatcttgtggaaggaaatttctaagcagcaaagcattcaacaagccacttgggtgctgttaaaggtattccgttttataaaggaagcaaagcgtaaatatttggaaaatttgcagtctgacagtgcgatagaaaagaaaatcccattttctgtggagaaattcaagccagctgcagaaatttgcataagtaataaggagccaaatgttaatccccaagacaatagggaaaatgtctccagagcacgtcagaggtcttcacagcagcccctcccatcacaggtccagaggcctaggaggaaaaagtggttttgtgggatgggcccaggttctccatactgtgtgcagtctagggacttagtgccctctgtcccagccacttcatctgtggctgaaaggagccaatgtagagctcaggccatggcttcagagtgtgcaagccccaagtcttggcagctttcatgtggtgttgagcctgtgagtgcacaaaagtcaagaaatggggtttgggaaccaccacctagatttcagaagatgtgtggaaatgcctggatactcaagcagaagtttgctgcgggtttgcggtcctcatggagaacctctgctagggcagtgcagaagggcaatgtgggcttggagcccccacacagagtccttactggggcactgcctagtagagctgtgagaagagagccaccatcctccagaccccagaatggtagatccaccgatgacttgcactatacacctggaaaggccaggcactcaacgccagcccatgaaagcagctgggagggaggctgtatattatatttgtgtgtgcctgtgagggtatttatggatgatactaacacttagactggtagattgagtaaagcagatttccctacccagtggcaatatccccagtgagactgggcctcatataatctattgaagttctgaatgaaataacaatttgagtaagaaaaaatacattctttcttcacatctcaaagctggaatatcagtcttctgcctttgtacttggacatggtctggaacttacatctttggttctcctggttttcaggtcttcaaacttgaacttatatcactgtcttcaggtctttcaactcagactggaattatgtaatcagatctcctgggtctttgacttgccaactgaagaccctggacttctcagccaccataattgcataagccactttagggaaaccagttgagagaacttctagttgttgggtgaagcatcctgaggggccacactgaagaaactccagttgtgaacattgcccattgttcagcttcagtttgtaggactttatagatacaagacaaccaaaaatctctaaaaagatcttggcatccaggttttagttgcctgtgactccaagtcatgagagtggaggaaaaattgggaatgttagtttggagagttgtggcaagatattagaagaaactaaaagaattgaaaatttggtaaggactgacaaatgtgcaagatggcagaatccaggccagtttatagatagataacaaaaacctcaaagacagtgaacatagctagtatctaataactcctttaggtatgttatagtgtgcaattaaagcgtaacttttctctctacaatcactgcacttttgattcttgtttacaagataagtctggcctcattagttttggcctgattatttacataagtgtgcaagaatagtaattgattatgtagacttttaaaaaatttgctttgctggaatctttgtgttttatttcattctcacattgctataaataaatacctgagactgggtaatttatgaagagaagaggtttaattgactcacagttctacgggctgtacaggaaacatgctttgggaggccttgggaaacttataatcatggcagaagggccatagggaagcaagcatgtcttgccggggcagcaggagagagagaatgaaggaggaaaagctacacacttttaaacaaccagatctcataagaactattatcatgagagagcactagaggaatggtgctaaaccactagaaaccacccacatgatccaatcacctcccaccaggccccacctccaacactagaggattacaattcagtgtgagatttgggtggagacacagagtcaaaccatatcatttgtattaaaaatttcatattcaacttttaacaactctcaaagctacaaagtcaagctaactcaccatcagattttacctgcagtatctatagacttgtgttaattcctttctttcttgaggtccccagaatatcctgattcctgagcttcccaggaagtcattttccttacttagctgtaaggccaaaaactccataactcaattaccaggctggctttcccaagaggactttgtaagcattggctccagaaaatcaacctttattccttaaaactgatcacatctgattctatgcattatttccaactgtaacattccagtcaaagtcttggttatgtaatcgttttttccaattatgtcctgttacaggaagaatggagacttattgaacttattcaaacaactatattgccatgaaaataagagtattgttatttgcacaagttaaataagagtttctgaattctggaggggtcaaaaagggagaaaaaaataaatggttcatttctaagtacaaaagtataatctaatacattgttatgaattatagataacttaagagaaaggggagaagggatccttaaatccagaaaatagaacactaaagcaggtaaaaacagcaatacaaactcactggttgtgttagttcattttgtgttgctattaaggtatacttaatattgagtaattcaaactcttccaacctctgtctgttacccagtttcaaagctgcttccatattttcagatatctttatagcaacttcttggtaccagttttttgtgtcagtccatttgcattgctataaaggaatatctgagactgagtaatttataatgaaaagtatttatttagctcacagttctgcaggatatacaagcatggcaccagcacctgcttctggtgaggcctcagggaggttacaaccatggcagaaattaaaagggaagccagcataccacacagcaagagagggaacaagagagagaaggaagtttcaggctctcttaaacaactagatctcatatgaactcaaaggctgagaatttactcattacaatgaagatgacatcaaaccattcatgagggatctgtccccttgacccagacacctcccactaggcccaccttcaacattggaggtcgcatttcaacaagaaatttggagaggacaaaagatccaaaccgtatcatttcaaaatataataatctctttccaatagtccccaaaaatcttaaatcattccagcatcactccaaagtccaaagttcaaagtctcatctgagactcaaggcaagttcctcccacttctgagctattttgagctaaataaaaaaccatctaaattgacttccaagatgcaatggtgatacaggcattaggtaaacatttccattccaaaagagagaaatcagccaaaaaaaaagaggcaacaagccctatacaattctgaaacccagcagggcagttatttaatcttaaagctccaaaataatctcctttgactccatgtcccacatccagggcacactggtgcaagggttggtttcccaaggccttggacagttctgccactttgcagaacttaaatccagaaaatagaacactaaagcagataaaaacagcaacacaaactcactggttgtgtttttttgtttgtttgtttttgtttttttgcagggtgcagaccccacagcagcccccaaccaactcatgggttggagttgagtgcctgcattttttcaaggcacagggcacaagctgctggtgagtctaccattctggggtttagaaggtggtggccaccttcccatagctcccttgggcagtgtcctgttagggaactctttgtactgtcctagtagaggctcttcctctgtagaaggcttctgcctggacacctgggctttcccatacatcttctgaaatctagggtgaagattccaagccttcttcatgcctgcattctgtgcaccttaaggcttagcaccacatggaagttaccaaggcttatagcttgcaccctctggagtggtggcctgagctgtacctggggccctttgagctgtggctgtagatagaacagctggaatgtggggagcagtgtcctgagtctgagcagggcaatgggacatgtctggacccagaaaccatactttcctcctaaacctctgggactgtgatgggaggggctgcctgggaaatctctgaaatgcctctttaaggccttttccccattgtcttggctattagcacttgtttcccatttaatcaggctaatctctctagcaagtggttgcctagaagccagcttcagcttctctcctgcaaatgctcttcccttctctacaacatggccaggctgtgagctttccaaacttttaaactctgcttcctttttattcataaattctgactttaagtcttactttgctcctgtatctgattgtgggctattagaagcacccaggctatgtcttgaacactttgctgcttagaaatttttgcttccagataccttaagtgatcactcttaagtttatacctccacagacccacaggacgtggacacaatgcagccaagttctctgctgaggtgtaataagggtggtctttggtccatttcccagtaacttcctcatttccatctgagactttgtcatcctggccttcactgtccatatttacatctgtattttggtcacaaccatttaacaaatctctaagaagttccaaaatttcccttatcttccagtcttcttctgagccctccaaactcttccaacctctctccattacccagttccaaagctgtttccaaattttcaggtatttttatagtaatgccctattcctcagtaccaattttctgtgttagtccatttgtattactataaaagaatacctaagacaggataatttatacagaagtttattttggctcacagttctgcaggatatacaagtatggcaccagcacctgcctctggtgaggcctcaggaactcaggaaggttacaataatggcagaaaatgaagtgggagctggtatatcacatggtaagatggggagaaagagagaaagaaggaagtttcaggctcctttaagcaaccaggtcttgtgtgaactcatagaaaacttattactgtgaagatgacaccaagccattcatgagggatccaaccccatgaccgaaacacctcccattaggcccaccaccaacattggaggtcacattttaacatgagattttgagaggataaagcatccaaaccatatcactggtttatctacactttattttttaatctcaattgtgtttctggcagatgaaataagtttacctactcaatatgaaggctaacactttttaccaatatttgtgcaggtgagttttaagacttttcattttaccctgatatgtaatcttatagatttgtgtactaaattttagatacgtgactcagggatattaaataactgtctgatgtatctgcatcccatctgagtggataaaatatccaatctgttttctatcagactttctgttcccttttcagcctcaggtggttccttttgggtattcctgaatcttttgaaacacctgatgagggtagagggctaaagttatagtgactatagggagttgaggggctgatgtagacagggaaaagtctggcagagatagacagagggatagaggaggtgggggattgaagagagacatattaaaggattcaagcagctaaagggaaaatcaaaaatagtaaaagaaagaaagagaaacagacgtaacgggaaagaagtagtcttagagaagccagtttggagtgatcttatatttccaaaagagatcactaaagtttcaaattatccttaacaaaatcatgacaacgagaaaggaaagagctagtgtcatagttgggtagcatatagttggcaggacttcaagaagggagagaagtctgacttaaaagctcccatgttcttaattaataataccttgcaaacagaagctgaggacactaactcagctttgtttgcttggaactctaactcagcttctaacagaaaggcctcatgaagatctaggagaaaattccaggccaggagtctgtaagttcatctccactagaaacaagaaggtgagaaaacttccatctaagaatattattgctcaaacaggtaattttaagcctgggactctaatatagcttcagagggcatactgagaatcttaagaatcaaaatctgtccttactgtgcttaaatggactgtcctctggagcactggtttaggagatggacccggcaatggagtcctgatcaaccagtcaggaggagtaaagacaaagacttcaaaggggcttacttggggttctgagtgagagcaggattcttgctgaaactaggcaatgcaggtttggcaagcacaggtgcaatggggcttgaagggttgtagatccagtcttagtccacagacgatttgcagaagcctgactaaagtttaatcgaggagaaagtctttgtcagtctgtgggggatatttgtctcaccagtattgaatactaccatatttcaatttttttctggtttaataattacaaaaagaaattgttctcatgtccttcagttctctttctttctttctctttctttctttctttctttctttctttctttctttctttctttctttctttctttctttctttctctttctttccttattagaaatgttaagtattttttgctgaggtttagttggccatgtggaaaataaatttttcttagtgattttttcaggtctctgtatcaggtcattcttgcattgctatcaagaaatatatgagactgggttatttataaagaaaataggcttaattggctcacacttctacaggctttacaagaagtacggtgctggcatctgcttggcttctagaaggtgaagggtgagcaggcatgtaacaaggtgaaaatgtgagcaagggagagagagtgaggggggagatgctacacacttttaaaatgaccaaatctcatgagaaattactcaccattgtgaaggcatcaccataccatgagggatccactcccataacccaaacacgtcccactaggccccactttcagcattggggattacaattcaacatgagatttggctagggataaatatccatactatatcattcaacctctggatcctctaaatctcatgtctttctcacattgcaaaatacaatcatcccttctcaatagtcccctcaaagtcttattttagcattaactcaaaagtccaaagtccaaagtcttatctgagacaaggtaagtcccttctacttataaccctataaaataaacaagttaattacttccaagatacaatgggggtatgggcactgcataaacatttccattccaaaagggagaaatcagaccaaagagagggtctacaggccctgtgtaagttttaaacccaacaggggagtcattacaccttaaagctccaaaataatctcctttgattctgtgtcccatatccagggcacgttgatgcaaggggtaggctcccaaggctttaggaatctgcttctgtggcattgcagggtttagcccctatggctgctctcatagtttgttcagtacctgtggcttttccaagtgtggggtgcaagctgctggtagatctactattctgggatctggagggtggcagccccctttccacagctccactaggcaataccacagtgagaacgtgtgggggctctgaccccatatttcccctcctcactgccctagtagaggttctctgtgagggctttgcccctgtaacaggcttctacctggacacccaggcttttacatacatactctgaaatctaagtggaggcaaaacctccttaacacttgcattctatgcacctgcaggcttaacaccatgtggaagctgccaaggcttatgtcttgcattctccaaagtagcagttgaagctgtatttgggcctattcgagccctccctggagttggagcagccaggatatgggaagcaatgtcccaggctgcacagggaagtgaggccctgggcctgctcaacaaaaccattctttcttcctaagcctctgggcctgtgatgggagtggctgaggggaagatctctgaaatgcctttgaggccttttccccattgtcttggataagagcacttggctctttttcaattatgcaaatttctctagcaataggttgctctgcagcctacttaaattcctctcctaacaattttgcaaattcttatagcagattttccaacagcatattttccaaatttttatgctctgcttctcttttaaatataacttccaactttaggtcatttctttattcccacatatgagcataaactgttagaaggagtcaagccacatgttgaacactttgctgctaagaaatttcttctgctagatactctaaatcatcactttgaagttcaaaaacttccacagatccccagagtatgaacagaatgcagccaaatgctttactaatgcataccactggtgacctttgctttggttcccaataaattcctcatttccatctgagaccttggtagcctggacttcaccgtccatatcactatcagcattttagtcacaagtatttaaccagtctctaaaaagttccaaacttttctgtcttcttccgagccctctgaactcttccaagccctgcccattacccagttccaaagctgctttcacattctcaggtatctttatagcaatgccctcttcagtaccaaatttctgccattcttccattgctgtaaagaaatatatgagactgggtggtgtctacagaaaagaagtttaattggctcacaggtctgcaggctttacaggaagcagggtgttgacatttgcttgacttctagggaggcctcaggaagcttacaatcatggaagaaggtgaaggtgaggagatttgtcacatggtgaaaatgggagcaagagagagagggagtggggaggtgccatacactatagtctctctacatatccagccttctaaactgtgagtacttgggaatatagcaatggctttcccttgctgtcctatttgaccactcacttaaatttactgaccattctaagtttattaatattggaagctcttttgtaacttttcttacatataaacttaccacaacatattagaagcaaatagctttctatttacacatgtatataaaattaaatatttatgcatgtaagatatacatgtgtctacatgtatgtttaatacagtggaataatgtttcagacaggcgatgaacacatttaatatatattaacatagaaagcattgtaataaacatcagcattaatagctttttgagatcaatttagttatggatccattttaacctgttctctaatggttaaagttaaatagtattatagagacaatgtaattgagaacagaatggccactggaaaaggaaattggtgggggattgaaacttaacggtaagtagacttgaattgcatccttaatggtgacttttaaaagcattgttaatctgtcagcatgtggatagcatttgtagtacttgcatacaccttcacagtgtccagaacctaccaaatgttttccattaagaaaaagcctcttcttccattaaaaaaagagagtatttgttatgacttcaataaacaaatattatagagtacaagaaaaacttctaaggcacgtgaaggaaattagactttgttcctggccctgttagggaggtaaggcataaacatgagttaagcaatcagaagaagtgtgcccaatatcactaaaccataggaatcttaactgaaaataaagactaatacagaaaacaaaaatacctggaagtgaagaaaggagggttgactggtgtggcagaagtggtgtggaattgaatccctatgcagaaagtggattctagctggttcttgaagaatggatacaatttgtacatttggagataaaaggagagcatatttacttcatggggggataaaacgttccagaaactattttggttagagaactagagaattggaatgaactagaaataagatttgtacaaccatctctcaaccaaaaaaagggtccaggtacactgacatgagctgaagttttcccagattgagccctgaaggaagaaagatatgacctatgactgaaacacagaatcaagggatgtctcaaaaaatagcaccaagagcaaaaactaataaaaatcaaagagaccggcccagaagtgaccaaccatgtactttggacatggttttctgggctggtctctttggagagcagaatttagatgggcatgcaataggcagaaattagggattctccaatgtgtttatatatacttatagtaaggaatgcaactatagagactgtcacctcatctgtggctggagatggagctgctaaggctatcatgcagattccaatacaaatttggaatgctagtttgggaccaaattatcaggaattgtaacttttagactggggacagtcataaattttaatttactctggaggcagtgatgatctcctggaagttggggtagaactaactgatgaaagaaaacaataaatttagaaagatgacataggaggttgtttgtgtatcccaaggtaagtggtgataaggatattacccagaaatttagaaatgcgaatagaaaaaatgaaaaagatatggggcattgagaaaaaaaagagttgttaagattcagtgattatttggcttccaaaagtgagatcaataaccgaattgagtcaaagacaattctaaggacttgagaatagtaactgggagaatattctgggagaactgatgggggacagggagtgtgaagtttacggttctttcagttggcaggtgtggaaagtaaagcataaagattaagttatttactaaatttaactaatcaagaatttgtagccaactaagttcctgaggcctcactattttataaaggtaaaataaatctatatttattaacaagtatccatttgttattatgattggctcaagcattttattttatttttcatgcaaattggcacagcattttctgtttgagtcagcatgaattagttaagcttaactctaatgattttgacctggtttcttgggaacagatgctattttacttcgtgtagtatctttggagctagctaccaggatgggaatgatctttttgaaaccaaagttcacgcaccattgaaatttcttcaggttacaggccagttgtggtctatcacaactttgaaacttttgtagaggaagaagacaaagaggcattaggaaaagatacagcaagacagttgccaaggaggtaagagataggagaagacacaataaaataagatttgagaacagtgcttcttaaactttaatgtgtatacaaatcacttgagggattttttttgaaaggcaaactttgattcagtagttctgtggaaaggcccaacagtctgttattctaacatgctctcgggagatgctaatgctgttgatccctggaccacattttgagtagctaggtgctagcaatcaaaggagaggattttaaactaaaaaaggtttctgtgctgcattctttcacattgcattttcaaacccgctctccacccttttccaccttgcagtatgtccaggaggttgccctttatggagtacaagagtgggattctttcctctggcttcctgttggttttgggcattacctaagaggcatcagcagaaactggaaagagaaatgtgattgaggacttggtatttacagttagtttcactctaccaggacatatgaattcgtaaaaatcaccacagtgtgtaaaataatgccattaaaaccacagagttatgggaagatggtattaggggcacaacattcaaaaactttgtcagtgacacacatacacacaaagatgggaacctaataaaagctgcagaacagttttgtacttgttaaatgcttaagaatactcataaatatgacaatcaatatggtactttaccttgaagagcacctgaagtatgcttgtgggtattagaaaggttgcagattgtgaggtactatgaagtggtagaaaaaatatcatctgaaattggaagaaaatttgtaataccagatgtgaatggatgtggatcataacacactcaatgaactgaggtagctgggagatatttgaggtgaatgtatgtgtgtgttttgtgtattcctaccaagtgtggttcaattctgcaattttgtctgttcacctagtatttcctatatgtgaatttgtgcataagaaaaaatcaaatttggttatattcaaattattttgcaacatatcaacagcattggaacaaatctgcacttaagatctgtgatgctcgttgctccagcaccctacttagagacatgactcttgtagtatcctctcctatagctacagaaattactcctaagttatgacaaccactattcattcaccttgtccttctgacccaggggttgtaacagctccctgctatttctaactttggatgatttcatggttgactcttagtttcatttaaccttgttcacatctttgtaaatagttcctttaatgcatgcccatcaattgcctatgctgtttgagtttgccacgtgggtctttccagtccccagacaatgttcaaaagtgattagtgatgtaaagagatcaagtagaattagggcttggtatcagcctttgaatttaattattattgatgtcaactaattgatattttaatgcactggttcgacacaccgtggccagccagacccattacaaaaagtaagttagatcaagccatcccctttctcaaaaccttatgatggcttcattttggtcttagagtaaaaccagtggtactttcaatggcttagaagactccacatagcctggtttcttgctgcatctctgaattcaccacatttcaggatcaatcatttatttttctccctttgttccaataacactggccttcttgtggtctttgaacatgccaggtgggcttctgcctcaggtcctttgcgttgggtcttcctcttatctggaacatactctccaatatatttacatggttaagtctttcctcttcaagtatttatttaaatgttatcctttcaatgaaatttattttgatctcccatttagaatgcaactcagtccccacaatatattggccctcttaacaagctctattttgttttccacagcactgccatgttttaacatgctgtgttatttatttacttgttttttaaatcttttttgactttcaatactaactagaataaaatttctcggggggctgaaaatttggggtctagtttttaaataggtatttcccaaattatgaatgaactgtcaaatgtgtgaagatgccactactgatgcaacatgtgctttgggttttcttttcaataatgtagacaggtgtttgtggatgtatcttaactgaacacatttgaaggctattttctgaatgaagagtacaatttgtaaccaagaacgcattttctaagtatgaaggtacttgacttttctgactgatcagactattcattcactgaaaaactaagtgatattgtccaaattaaaatattttcaagttataaagatattactttaatgaaaagttgggaggggggctaccaaattaccacaggcccttggaaatcatcccagaagtctaatgcctgacccatctaggaatcttcttaacatcatcactgaagctaatcatccagtcacagcttaaaaacatttcaggttctggtttacattttattaggttttaattagaagtcattgtttgaatgaaaaaaagtgttcctgttcaatagctccatgcaggcactatggcaataacagcacaatttcttccattaaaaacaggacttctttttgtgtttgaggttcatttctataaagctctgaaacctggaaattctcccttgcagtctaagccacacttagccttattttttgtcagaacacaaatagaatcttgtccacttttcaatatttatctgtattttgctagaaagagtttggttttacattcttataattattactagcatcataagttctgaagttacttaaggctcacaaatgaatgaatgacttctaatgatacaaatgaattacatttcatagtttgaaagtttaaaaaatgtgcctttgtttttctctcaacattcttagctttagctaggatagataaattctccaaggattggagctttcatacatttacacatgtaaataatgagggttcataagagatccagaaaatctctttccttgtatttctaagaataacttttattgaactttcagaactagtttaagacacattttattaagttgaagtcactgagttaggtataagataaggctactctttttattatgatgcaactaattctaaaaaatatttaaattagggatctattttactgttcttaattggatggctcaagacaaagataaaagtaaaactttaattcatacatttaaaacagattttgtgaatgacagttatgtaaattcttacagaacattagtacaatgacatctaaatcataatatatattcaattagtttttcatttattcagtgtttatagagcactaattatgtgaaagtattgtagtaaaatgacaaagaagactggcactttatactacatttcatgttttcatattggaagacacattagccctaaaattggtaaatgacaggctttgggcaactgaattacagtttttgcttccttataatgaaaatcctccttatatagatgaccaaaaataaatgctattctctagttggttacagtatattcatttatgtcacactgactaagaagctcgacacttgaaaaaaaggaatcttacagttctgtattcctgaagtgcttaactgaagtgttaggcaaggagtggaaactgaataaatgtgttgagtgatgtaaaataattcatgtaatcatgtgtatgtttagtgacaagctgatgaaacatctgttaagttgaatttttgtttatgcagatatttagttgctctttatacatactcttaagttggaaaagtctctactataatcatataaacactaagtatagaccaaattatacataactcttatcaagtttttgcaaaagtttaacgtgggaaaattctgaactaggaattatttttcttcagagattgttttctctttcaggaaaatcaaatacccagacatgatgggaaatcactgcagaatacagaagacaaacaaaacaacaacaaaaactccacaatatcaataaatccagtgacaatatttttagacatttacactgaaaaagaacagaacagtcattgtacagtttcaccagataaagaatgagcataaaagtggcatgcaataaaataatttagtatcttcctagctgctggcctacagtgaggcttgcagatgggaaggtgcactctgaggaaggcattgatggtaccagcatcaagtgcagatcaacagagattcacttcctctgccaattctctattcttgtgtaaaaagagaaaacatacatgaatgggtgcaacatctgttgaactgtttttaatgtgccaaagtagaatgggattttcagtttaagaaacagggtttaaaaaagaagtaaggagaaaaatgtggtgcaaaattaggaaagaaaatatttatgtaaagaaatcttcatgagaaataatatgaatatcccactgaagataggttgacaggcagcttgatgggatagctgattgagacagagaagagattctggatttaaaaaatacagtgacaattaaatgcaacagaaatttggttcagttgggctttagggaaaacataatttttttgtcacacacatttctgctgcttgctgatttatggggagagagtggcattgaagaaaaggagggtatcagccaaactgtctgaggtgaggaagatctcatataatgttgcagtcacagaaaggtgtcaggcagctgaccaagggtggtgacttcccattcccaaaagtcaaggaggatttaacatcaagcacgaaggctcactacagagaaataagagcaaagaacatcaatgatgtgagtataagaagcctagggaggaagacaactgccataatttatgggctaatctgaatatctgtctatctatctgtcatctacatatctatctatctatctatctatctatctatctatctatctatctcagactaggatattaatcaaacgtatttatgttcaatattgaatattgaatgtggattattaccaatcaataattccttggcatcctatcaattctatcggttaggattctcctgcctcagcctcccgagtagctaggactaccacacccaggtaatttttaaaattttttgtagagttagggtctcactatgtcgcccagtcttggcttgatcttctggcatcacaagagcctcttgccttggcctctcaaagtgctagaattactggcatgaaccaccatacctggcctattattgttaaattttgattttaggccgggcgcggtggcttacacctgtaatcccagcactttgggaggccgaggcaggtggatcacgaggtcaggagatcgagaccatcctggctaacacgatgaaaccccgtctctactaaaaatacaaaaaattagccgggcatggtggcgggtgcctgtagtcccagctacttgggaagctgaggcaggagaatggcatgaacccaggaggtggagcttgcagtgagccgagatcatgccactgcactccagcctggatgacagagtgagactgtctcaaaaaaaaattttttttgattttaaaatggagaatatataaatatttatcattaagcaattggtcagattataatttatctcttcaagataacatataaactatttattatatgcaactatatgaaagataagaataagataagtacttatgtggaattacttcaaagataagtaataaaaaggtaggtttagaacaataaaaatactattatgtgtatatattatgctattatacacacacacagatatgtatgtttgcctatgtgaaggatgcttccagaaaatgtacttggagaaattatttgagtggtgagtggctgagagactgaggtagaaggaaattactttttattatacacattttgtatttcttaaattttgtagcatgcatatattgtagaatgagaacaacaaatacaggtagcactttgcattgttcaggcatacataaatcacagttaccagttagttaaatagtgtctgtccctcaaaaacatggttaaaatttcaattatcattgtatattaactgcaagtaattgcataaggtacaaacttggctgctagctcttcagttcacaaatcaaaatgcaaataaaagatgatgttcatcatgatatatgaccaaccacatcacttcttccaaaattgggtgattaatagttactgcactactgttatttggttcactcacaaacagcaaagtgttttgttgtatttgtctctagttgatgaaaccatgtggcattttatagaaatggataaagaggaaattggctaacaaagatgaatgtgcagcaaagaaaccaaagtgaaaatattgaaatgtgaggataatgtaaatggagttatagaagaaatagctgatgtgaaaatgttgataaggccatcgttggaaacactagatatacagctggagcaaagcaagaggtgaacttaccaacataatagggaaagtggccatgattaaaggataaatatgttccagaagaattgacactggcaataacaacttcacattaaagccacacttagagatgcttcatgacatggaaagcacaaagcataaaattttggaagctgattcaaagttggaaaggaatatgacaatttgccaaggcataacaaagatgcttgattcatacgaagaattataaatgagaggaaggcaagcactgttttgaactattctcggtaagtttttacaagacaagaaatcatgtttctaatgttttaaattactgtgtattaaatacacattgggttcactattttttatttccctatacatttataaccaataggaaaagagttttcaatgttttgataaagattttaaaaggccacagacaattgcaatttttctcattgataagatggtttgcatagtttcagcttgcatgatcatttttatgatgccacacgactgtgtgaagcaagggctacttatacaatattttaaagaaacaaaaataaatttaagatttattaaatttataagtaatttctaaaaattatataaaatcatctttgttcttcttgcttttctatgagcaagttaatcaaaataacaccagaaatggaaattaatttctgtttgaaaatctaaaacatttataagggagataatgagataaaaaatgtttggtgtctgctctgcttttaactcaggccaactcatcaacataccttgtgactgattattgattaaaatgagccctttgcactctaatattattgatggttttcactctgtcccacctttctctcattctttgttttgttcccatgacaacttttttttctgctaatgttcttgaaagctcgctccagcctctttgggatctctggtgtacagtatctcaagtccaatacctggatacctggtttaatgccttccatttaccagttatgcatattaattttttcgtaccagacttctttcttctgcatcacctctctcccaacttccaggcccatccaagaactggccaaaagaaaagcatagtgatttggatgcctcaataatacaaaataactggcttagaaaggatagaagatttctttttttaatctctaatgaaaatctgagtttgtaaatgatccaaggtaatagtgcagaggggattatggctgcctctgtccccagggaattggggaaaagccagtagcaatgggcctcacccagctcccatgcagttggtgaggctggtcttgctcctgccatgccccactaacagagccgagtttatatccaggcagcctgtgtgcaggactaaaacctagccccaggctataagttttcctgctgagaaaacaaacatggctttcaggccatgccccttcctgtctgcccacactgtctgtcactactcttgctcttctttctggagcagttcccattcacacccaaattacgctcaaaagagttttacccagtcaaaattattacaaagttcggctggaagtttctttcaccttgtgacccctcccaaactgcaccagttgccttttccgagtgtccccatgagacttagtcagggatggcttccctgggcttgagctggagaatggctgtgcctacaaggcttcttccactgctgcttctagttttatattttattctaaattcatttcagctctgggtaaggttaaatccttctcctgtaatctggatttttgggtttccaggggggacatgtgttcagaggcaggatttccccctctcgcactttgggaactcgcagttttttgcttgtctcatgggatttgcagtggcttggtgcttttttatttaaagaatctgtgaattattagttttcctggtatgctcctgcagtggttcctggagcaaaagtgcacagtatgggtctccacacactgttccatccatccaaatggaagttgcatgtcagccctgcatctatctaccaagttcccaagtctcaacattgcttcgttttttgtttttttttgttgttttttttttcattcttttttcttttgtctcctctggcagtgcattttcaaataacctgtcttcaagctcaacaattatttcccctgcttgatcagttccactgttaagagactctgatgcatccttcagtatgttgattgcatttttgaactctagacttttggcttgatttttaattcaatctctttgttaaatgtgtctgatagaattttgaattctttctttgtgttgtttttaatttcactgagttttctcaaaacagctagtttgagttctctgtctgaaaggtcacatatctctgtttctctgtgttggtccttggtgtcttattcagttcatttagtgaagtcttgtttttctggatggtcttgatgcttgcagatattttctggtgtcagggcattgaagagttaggtatttattgtggtattcacagtcttggcttgtttgtacccatccgtcttcggaaggctttccaggtactcgaagggacttggatgttgtgattattgcagtttttggtcactgcagccatatctgcattagggagcaccccaagcccagtaatgctatggctgtttcagatctatagaggtatcacctttgtggtcttaaataagatcataaaaaattatctggattaccaaaaagagaatcttgttctattcccttactttctcccagacaaagggagtctctctctctctttctgtattgagctatctggagctgggggaggggtgacacaagcacccaagtggccactgccactgggactgtgctgggtcaggcctgaagccagcacaacactggatcttgaccaagtcctgctgtaaccactatctgactactgcccatgtttgctcaaggatctaaggctctaaaatcagcaggtgacaaagtcagccagccttatgtccttcccttcaaggtgacaagttctcccaggtcatagaaaggcccagaaatgcccgccaggagccagggcctggagtcagaaaccttaggaatctacctggtgctctattctactgcagatgagctgacactcaaaccacaaaacaaagttcttcctactcttccttgctctttccacagacagagaagtttctctccatggccacaccaccataggatcatgggggctactgccaggccaccactgatgttcactcaaaggccatgggtgttttagtcagcttgtggtgaatgctgccaggcctgggactcacccttcaggaaactgggctcccttctaacccaggtcaggtccaaaaatgtcatccaagagccaagtccttaaatcagagatcgcacaagcccactttatgttctaccccactctgtcagagctggtacctacggtggaagacaaaaacactttttacttatgcagaaagagtctctcattatagccactacatgtggaaatatgatgggtcacacttggagatagcatgtttcagattcttgttcacggcccatggcatgtactacctggctactgtggctgataattcaaggaccaggggctttttagtcagtaggtgactactcctaccaggactgggtccttccctttaaggtagggggttctcttctggcccagggtgtgctaggaatttcatccagatctagggcctgaaatgcggtctcacgactctctctggtatcctattttactgtggctgagacggtatccaagtcgcaagtggaacttctctttactcttctctctctcttctcccccagtggaaggaagaattctctttcagagctgtgagctgtgctgcctggggttgggggaaggttgggacaagcattccgttggcccctccagctggtgtctcactaggtcatgtgcctctcaagtccactggctcaaagcccagcacagcattacagcttgcctagcagttgcagtccttgtggcctagactgactttctagtttatttaggatcccagaacagcttagcccaaggtagtgaggcttgctggaactcaaattcagagagctaggatggatgactcccctctggctagggctggcctaaatgctccttttgtgggtgtttattgagttctacccagtattatttttgctgtgacaggggagcactgagttccaatgtgaagttccacaatcacttcgcttccctccctcaagtgcacagatactctgtgccacatggctgctgcagggtgatggggagggtggcatcagaaatttaagactgtcttttctctccttcattctttcagtgaacaaagttaaaaccagatactgttagcattcacctgatttttggttcagatgaagactttttttgtgtagatagttgttaatttggtgttcctctggggaagacattcagtggcggctactttttggacatcttgttctgcctccttcttcttcaatttatcttaccagtgttttataataattttccttctcaagtctgtcacttctttggttaaattgatccctaggtagtttatattatttttaactattgtaaataggattgctctcatgacatccttttcagatatttcattgttggtttatataaatgccactgattttgtaagttgattttgcatcctgcaacttactgaatttatcagttcaaagagtttcttggtagagtctttaggtttttctaaatatgagattatgtcatctgtgaaaaaggctaatttgacttctttctttccaatttggatgcctttttttctttttattgcccaattgcaaaatgtttggtagaatgcagaggtgaagccaccaggttctgggcttttctttgatgggatttttttttttattacagctttgatcttattactcagtattggtttgttgaggttttgtatttcttcatggttcaatcttgggaaattatatatacctaggaatttatcagtttttttctaagttctccaatttgtttaagtttatggtaataggctctaatgattctttatatttctgtgttctcagttgttaggtctgcattttcatttctgattttatttatttgtatcttttctctttttttcttagtctagctgaagatttattgattttgcgtaacttttcaaaaaaccgacttttcatttaatctgtatttttattaccattttatttctgctctaatctttattatgattttatccttctactaattttgtgtttggtttgttcctgcttttctagttccttgaggtgtttcagtaggttgcttattccaggtctttttacttttttgatataggtgtttattgcaataaacttgccttttcatattacctttgatgtatcccacagattttggtatgttgtgtttccattttcattcatgttaagaaattttaaatttttcttcttaatttcatttttgcccattggttattcaggagcatattgtttaatttccatgtgtttgtgtggtttctgaagttttactggttattgagttctagttttatttcactttggtcagaaaagacactatatatgatttctattttttaaaatctgttgagactcattttgtggattaaaacatgatctattctgaagaatgttccatgtgctgatgaagagaatgtgtgttctgcagcagctgagtgaaatgttctgtaaatgtcagttggtcctattagatctagtgtgtaatttaatgccgatgtttctttgttcattatctgtctggataatctgtctattagggagagtgggatgttgaaattccttactattattggattgcagcctatctctccctttaagtttattaatgtttgctttatatacttggtattgtatgcatagatagttataattgttacatcattttcctgaattcattcgtttatcattaaatagtgaccttcttggtctcatttttgcagttctgatttgtagtcttgtcatttgatataagtatagttactcctgcttttttgggtttccatttgcatagaatatctttttccacctctttactttcagtctatgtgtgtctttataagtaaagttggtttcttgtaggcagcacaaagttaggtcttatttgtttgttttaatccattcagccactctatgccttttaattggagaataagtccatttactttcattgccattatgataagtaaggaattactactgccatattgttgcttgttttctgggttgttttgtttcttctctcttcctttcttactatcttcttttgtggttaagtgatttttctctgacagtatgttttaattcattgcttttcatttttaatgaatccattgtagatttttgcattgtggttatcatgaggattacaaaaaacatcatatagatataacaagttatcttaagcagataacaacttatcttagctcaaaagaaaaaaatggaaacaaagaaagaaaaaaaaggaaaacctttaacactttaactgcatcccttcctcatttggactttatgttgtcttaatttacatattttaattttgcctatctcctaacaggtgggtgtagctatgattgtttttgatagatttgttttttgggcttcatactagaattatgactggattgaatgccacaattacaatattagaatattttggttttatctgtgtgcttaattttgccaacgggttttataccttcgaatgttttattttgcatattagcactttttttactttcagaaggaagaactccctttagcatttcttgtaaaatgagtctggtggtggtgaattctctcagcttttgtttttctgagaaagattttatctctccttttttgaaggatagctttgctggagacaatattcttggatggcagttttttttctttcagcattttgaaaatgttgtcccattccctcatgacctgtaatgatttttattgtgtttgtggccagatgaattggagctcttttatatgttatttgcttcttttcacttgctgcttttagaatcctctctttgtccttacctttgagtgttttactattaaatacattgaggtggtcttatttggattaaatctctttgttgttttctgaccttcctgtacctgaatatttaactctcttccaagttttgaaactttttattttattttattacatctttgaacaagttttgtatcctttccttttgctcaactctatctcgaacacaaataattcttagatttggtcttttgaggtaattttctatatctcttaggaaattttcattttttccttgtttttctctcctctgagcattttgaaataacctttcttttatctcactgattctttcctctgcttgatacattcttctattgagagcctctaatgagttcttaagttcttgatatgtttctgaattgcttttctgtgtttagagatcactgagtttcttaaaactgctgtttttaattcttgataagagagtttacatgtcactgctttgtaagtgtcggtcactagttccttgttttgtccatttgaggaggccatggttccttgtttgctgtttttttttgtggaagtacagctatgtctttgcattgaaggattagttatttattccagtcttctgtgtctgacttgttttgattttggggggatatatttgcttaaagattcttcacattttgcctgttgatattcatttttcttttatttcccccactaggtggccacctactttttggcactagatggtgccttaagcccaggcttgatttcgttctagcaaatagtccaagtgccacccatcccaaactggggagattccaaaggagatatcccagaagtgtgagtaggctgattaggggtccatgccctggagacctgtgtaacaaacctcctactatatggtgctgctgaacagcctttctgttttggcatcatctttgactgaattatagcacactgtttctggagctaggaatgatagtcccaccctttgtctctggctatcctcaaggatattcttccctctagatactgccagtgtttcctgtgggttgaggcatgaacgtatcttctgccagggaagccgaaatgctgcttggccacctcaatctcactttttccagtgtagaaactatgaattgaaaggaaattgtctctgcacttagtgtcaggtggattgcaggaagattgttgtgactatgaaagtctgagtctctttctgttggcttggagtttttccacttctctgtggtctcaggaactgtcttatcttcatatttgagttctggtatatttctggtgataatcttagcactgcataattgttttcagtttcctatggagggtagtaaagccagcttgctcctatactgccattttaggacttgaaggtagcacctactttagacaaaagctaaccaaaggcagaaggagtattaagattttttttaaaccatcactaggaacaaaaaggataatttattaataaacaggaacaatgcatcacaaagatataaagatcctgaaaacttacatactttaaaacctaacctcagggtaaaagatatataattaacagaaataggaagatcatgaataaattctaaatcttaatgggtgattttaaaatacttctttttgacaacgaatgataaaacagacaaaaacaattcttggggataataaaaatttaaagaatatatttaataagttggatttgatgaatatatagaaccttgcattcatagaaaatgttcactcatttccagcacacatagagcacttatcaaaatgaccacataatataaactcaaataagtatgtgcaaaattataatttttcattctttgtgttataacctcaatgtagtaaatttggaaattggaggaagaagaaaattgcaatgcctatatttttggaatgtaaagcaaacaaaaactcagcactttggtaaaaattcctaaaccaaaaaaattatactgtgaattacaaataattattgtagggaaagaaagttttttttgtcacctgttagaaggttcatagtgaaggcacatataacaaaagacagattaacaagacatacatatgaacatatttaattacaaagttatatacaaatttatttaatgtaaattttatgtgatacaggagccttcattagaaaatgaagacccaaagaagtagaaacctgtgtatttttatgcttaagtttgatgaagagtgagcagtcatggaaaaatatggttgaacaaatgaagtgtgatctaatggtaataaatgaagggaacttagtaatgcctatttgtttagattattttctgtgctccattttctttagaaataaagatgttcctttcctctggttagatagtggtcatctttcatgtgaaggtcttatgccctacttcagggagaggttagaaaattctttctaggttttttggtctgctttaggggaggagggtgggagaaggtcagagagacccttttacttctgctgttttctcaaaaatttttagcttaaaatagtatcctaaagtgccatatctagattagatgttctgagcctgtcattagaattaaatgacatgggaaataaaatacttgtaaaataaaaacatgacaatttttatatttaaatttatatattagaaaacacaaagagacacaatatttaacctacaagcttggaaaattaaaaatgatgaggagctaactcagtagaaggaatgaggtaaaagagatgttaataaaatataaaagaaaaggaaaatggaaaggttttacaaaaccatcaaaagatttaaaacagaataggcctggtaagatttatcaatgaaaaaagagaaagagcaaaactggacaattttaggaagggaaaaaaggacatgaacacagatattgtagaaatttaaaaaatctctacagtggcaaaaacatttatgaaatgaacaattttcaaagtaaatttaaattaagaaaaatgatttacaaagaaaggaaaaacctactggacatataatcattaaataaattgaattagtagtttaaaatgcagtcaattgtcattatttttagtagtgatggtttagtaaggcaccacaaacattgaattagcaaatacaaaccactgttctagtagaaataaaaagataggttttggtgagcctctggtcacatttttaccacctgatcaatacttatcttgttttacatgtatttctgtttaaagacactgttatttaatatatattgttgattaattagcatcaaactcagagccaacaacactgtaacatgtctggactaaatacattttctccattaagcacatcacagccttctcatgcttgggaacactagacagaacttcagtactacatttaggggtcatttcaagtaccaaaatcatcaaccaaaagcacaaaaatgagaaaaatgtggcactaaatagaccacaaaaaggacacctgtttacagtgtgacagctaaaacataaaggcagagattcactttgacctcagatgggaccaagtgtgttgggatactcaaatttttcactgctctgcgtatttttttgaatactgcaaaaacactctatgagtattgacttggggattataaacaagttctagtgagtaggcaaattcacagatacattatatagtaataaaaaattaaattatatatctaaataattacatagcttaatttctatccataggaagatttataatttttaaaaattggtgagcctctttctttctctttttctttctttctttctttctttctctctctctctctctctctctctctctctctctctctctctctctctttctttctttcttgaaatagggtttcaccatgttggccaggctggtcttgaactcctgacctcaagtaatctgcctgcctcagcctcccaaagtgctgagattacaggcgtgagccaccgagcccagccagtgatccttatcttataaaaattattttagagaaaagaaaaaatggaaaagtttcctaatacataaccttgataataaaactagaaaataaagaaaaattgtaggataattcacttaataacatacatggcaaattctaaataaaatattagcaaaccaaaccagaaaatcattcaaattatcaagtaggtatgaaaagatagtttaattgtagaatataataaaatgattctgagagatacaaaaaaagagatgtctttcctgctctcttgtgtttactcagtacagcacagaacacttctgtggccagatgtgtggaagattttcaccacacaccaagcaagtctccaatagataccagttgggtgccctataattcaattcaattctaacactatctgcctggaaatcatgtcagatcccacagattaaaagctcagtcccaaaagactttgccacacttcggatgccaatcacaagcctcacactgcgacccatgcttctgttacatgtacgagtctgcagcaacctcaattcttgcctcctcagatgaaagaatttggggagcataaggcagaaggagagacctggcaggagtgaaagtttattaaaaagttttagagcaggaatgaaaggaaataaagtacacttggaagaggcccaagcaggtgacttgagagatcaagtgcatggcttcaccttttaacttgggattttataccttggcatatttccagggtctagtgtcccttctcccctgattcttcccttggggtggactgtccgcatgcacagtcgctagccagtgcttgggaggggaagcacatgcagtgtgattactggagttgtacacatgctcacttgaggcattcttcccttaccagccgaatgcttctggaaggtcatacacagttagactccatcattttgcctcttagtgaacatgcttgagcccacttgcccaactcttgagatcttttcaggaagctgctgatcaccagcttcagggttttctggctattgaaaactgcctttccttggctctggctgcaacagattattattttagagaggcagtttaataattaattacctgatcgtcatctgatcgttgcctgacattcctggtgtgtgtgtgtgagtttcagggggagtcctttcctgctctgctcgtgtctgactagctatcaactctaacatttctgaccaaccactctaagttggtgttttcacaatccactctttgggtttgattattgctacagcagctcactggattcagggaaacactttacttaagtttaacactttgctagtaaatgatacagatgaacagacagatggaggaaaagcaaaaagcaaggcatgtgggaaagggaacagagcttccatgccctctccaggcactccaccatccaggcacctcatgtgttcagcaatccagaaactccctaaatcctattcctctgagtttttaaggaaatttcattacataggcatgattgattacatcattggccattggtgatcaactcaaccttgcaagtgggtgggggcctgaaagttacaaccttctaataaggtggttggttctcctggcaaccagcccccatcctgaggctatccaggaacccctagctaccagttatctcattagcatgcaaaaaagacaataatcatgttgggaattctgtcttttcgaagttgtgtgccaggaaatagggattaagaacaaatataaatatgctattataaatcacaatatcataatggtttcccctgttaacagactaaagaagaaagtctataccatcacctcaacactttagagaaataaatactttagagaaataaatataataaaatactttagagaaataaatacaaaaatatttcatatggaaccaaaagagcccgtatagacaagacaatactaagcaaaaagaacaaaactcaacactttttttaaaaaaacaaaacacagctctgccttgctgccatagatcagtagttgtcaagctttacatgcatccaaatgatctagcaaacttttaaaaatacagattgcttggccccacccccagcatttttgcctcagtagatctgggaagaggtcagaaattctccatttctaacaagttcccaattgaagctgatgctgctggtccagggactacattttgagaatcactattatgagaattgctgttatgtaggcccagtactgacttttaaagagcactcagaatgtaaaatatccacttcttaaaaatgttaagtaatctaaattaatcatatctgacagcaatatcagacatgtgtatataccttaaaaatttagggatggatgttttgtggtttgtaatttcccttcccacttacctctgcctcagtttatattgctattgaagttttccagaactattatctccttcatatttaatcactgactgttttataatcatcaatatcatgtgtaattggtcccacttcaattattctagtaggcttccaacagaattttacctgctttgaaccatgcactgttttcatataatgtgctttttttcttccttttagaacagaacatataatagcttttcaacagagaaaaaattcttttgatgtagatttttgctcaatggacttaatgcgtcttcatttatattcagagtagaaaaatgttacatattagaagtggaaaataattctatgtgcatatagctatgattttcagttatttaggtaggagatcatgagcaagaatacaagcatgttaaaataaggaaggttgatcaatgcattaattttttttagagatgggggggtctcactatgtttcccaggctggcctttaactcctgggctcaagtgattcctccacctcagcccccacaaatagctgggactgcaggcatgtgccaccacatctggataataatcttttttcgaagttgaatatgaatagattttattgtatgttcattatttttccatctctttattgtagacttgttgttcctggcatccaggaatagcttttaccattatatgtagggattctttagagatattatgggttttattccagaccaacaaaataaagcaaaatcacaataaagcaaatcacagagttttggtatcccagtgcatataaaagttatatttacactatactgtagtctattaagcatgtaaaagcattatttctgaaaaatgtgcatacctaaattaaaagactttattgataaaaattgttattgatcatctgagccttcagggagtcctaatctttttgatggtggagggtcttgcctcaatgttgatgatgttgaatggctgctgatggatcaggttgctaaacttgaggtggctatggcaatttcttaaaataacagtgaagtttgctgtattgattgactcttcttttcagaaaagatttctctgtaccatgtgacgcatttgatagcattttacccacagtggaacttctttcaaaattccatgtttatggaatattctaattcctttgttgtcatttcaacaatgttcaaagcatctttactaggagtagattccatttcaagaatccactttctttgctcatccataagaagcaactcctcactcatccaagttttatcatgaggttgcagcaattcattcccatcttcaggctccacttttaattctagttctcttgctatttttaccagatttgcagttacttcctccttgaaagtcttgaacttctgaaaataatccatgagggtttgaatcaactttttacaaactctttttaaggttgatattttatcctccttccatgaatcacaaatgttcttattggcatccagaatgatgaattctttccagaaggttttcaatttactttttccagatccatcagacaaatcactatctatgacacccccatagtgtaatgaattgtacttcttaaataatgagacttggccagaggcagtggcttatgcctgtaatcccaatactttggaggccaaggtaggaggatcacttgagccaaggaatttgagagcatcctgggcaacatagtgagaccctgtttatataaaaataataaaatacaaaaaatagtaaggcttgaaagttgaaattacttcgtgatccgtgggctgcaaaacagatattgtgtgagtagacatggaaacaacattaaccttgtgcacccccatcagagctcttaagtgtctaggtgcattgtcaattaacaataatattttgaaggaatttttttctgagcgttaggtctcagtagtaggcttaacatattctgtaaaccatgctgtaaacaaacgtgttatcattcaggttttcttattccatttatacagcacaaatagagtagattcagcataattcttaaaggctctaggctttttggaagttaactgagcattggctttgacttaaaatcaccagctgcattagcccccagcaagagtgtcagtctatcctttgaagctttgaagccaagcattgacttctcctctccagctatgaaagtcctagatggcatctttttccaatagaagtcagtttcatatatgttgaaagtctgttattcagtgtagccacctttattaatgatcttagctagatcttctgggtaacttgctgcagcttttacatcactacttgctgcttcaccttgcacttttatgttatggagattgtttctctttttaacctcatgaaccaacctctactagtttccaatttttcttctgcagcttcctcgcccacctcagcctgcataggattgaagagagttaggaccttgctctggattaggctttggcttaagggaatgttgtggcaggtttgatcttctcttcataccactaaaactttctccatatcagcaataaagttgttttccttttttatcatttgtgtgttcactggcctaacactaaatttcctttaagaatttttcctttgcattcacaacttagttaactggcataagaggactagcttttggcctatctcagctttcaacatgacttcttgactaagcttaatcatttctagcttttgatttaaagtgagacatgtgactctttttttcacttaaatacttagagatcattgtagcgttattaatgggcctaatttcaatattgttatatctcatggaatagggaggcccaagagagaaaaagaggaagggaatgatcagtggaggaatcagaacacacacaacttttatcagttaagtctgctctctcataatggtgcaatttgtggtgctccaaaacataatagtaacatcaaaattcaatgatggtagaccactgattatagactaccataacagatataatcatttaaaaaagtttaaaatattgcaagaattacaaaatgggataaagaaacacaaagtgaatacatggtgttgaaaaaatgcccccaataggcttgctgaatgcagggttgccataaaccttccatttgtaaaacatgcaatatctgcaaagtgcaataaagcagaatgcaataagatgaggtattcctgtatttagataggataaccagggagaaaacatgaaagactttttgttctttggcaacatgtaagttgatttttatataatcatttttgttctaaagatattatcatcaatgcgtatgtaaacatatttcatattcacacttaaatgaatatttaaaaggaaatagtgggacttatatattgtgttaccagacattttctcaagtgcaagtaagcactttgatttcaacttagtattttactttttagaaaagagtgggtaatgttatgtaccagtaagtgattgataaatgacagaatgtcccactctatacttggaaatagggtcaagggcatagctgcacaggggtgtcaggggaggcccaagatcagcctccaaaatgagcattacattgaagaaattgttcctacaatccagaaatcttagagaatatgatagaaaatattatagttatgtgtcacttaacaatggggatacatcctgagaaatgtgtcattaggtgatttcattattttgcaaatattatacattttcttatgcaaatctaggtggtatagcctactgcatacctgggctagatggcatagcctattgctcctagactataaacctgtacagcatgttactatactgaacactgtaggcagttgtaagacaatggtaagtatttgtgtatctaaacatagaaaatgtacagtaaaatatggtgtaaaagcttaaaaacagttacatctgcatagggcacttactgtgaatggagcatacaggaccagaagttgctctgggtgagtcagtgagtgggtggtaagtgaatgtgaaggcctcagacctaactgtacactaatatagcctttataaatatgtacacttaggtgacactaaatttatagaaaatattttatttaataataagcttagtttactataacctttttattctataaacttttaaattatcttaaagtttttgactcataatagcacttaaacacattgtacaactacacaacaaaagtatcttctttcttgatatccttactctataagctgtatttaaaacttttaaattttctatttaattttactgtttaaacttttttgttactaagtaaggcagagaggcacacatgagcctaggcctatacagaattaggatcatcaagacgtcaagaagcaattataaccttatgagaccactgttgcatatgtgcagtgttattgaccaaagtgttgtatttctttataatgtaatattttttctgttaaggtgcataaacaataaattttcaagtaaaatattggtggtttcagaaaaaaagtggattggtcattggtttaaattgagggacatcactgctaggtgctgaataaaatatattttttgaaaaaataatttactttctccatgaagagaaataattaaaagcagatgtgagaaataagttgggtaagaaaatttataatgcaaagattacttttatttccctcagcttttcttaaggatcagttttccaaatacaaactgaaaagagaagtgattttgaattttgttcgtagaatccatcttttacatactcaaaagatttattttggtctctaataattaaaggaaatcatattgattgcatggattgctctaagttctcaactgtcatttagactttttgtacttggctgcagttctttatccatggaatgttttttaaataacatccatcatgatcttaacttctttttcctcagttctctttgaagctcaattattaattttattcctcttccaccaccgaggaaatctaaccttcagttttatgttctctttatattcacacatttctaggtatgcttggagttcttttttgatatctttttaatttctggatcacatcagttttattctgacagatgcagcctctaaaataagctgtgtgatgcactcaaacctaaaataaaccattatttcagggttaggtgcgtcatacctgcaaataacctcatttatctagagaaatgtatttaatgcttattgtataaataccagtgtttcagcgtgatctataataccatctgtcacttctttttgtccaatacataattcaatcctttattccagttttttgagaaggagagctcttgcatattatcttatacatactgtgacaagaacccaggcatattatgaaaatatattaaatattatccaagataaaattttaatgcaagttgaatgaaatgctatctttgttgctaagatatgcattaaagtaagcttatatcattggcatctttcacgaacttcatttaaagtatattttaaacacaatgttctggaaagtaggaaagtaactgctatttctattagaggactgttgtctctggttatgacacagaatgctctactgcagaaagagaggaaaataaaaacataaagtggtagcacgttgctgaaaaagcagcatttttttttcctcacaccttgcctgaaaaactttttgcctggattagaatagagccttagatggatatttgtagggatgcacatccagaatatatgtcagaaaaaatttagattatcgaatatttgttgagtgaatatgaggtgcccgacgtgatactaggttgaggaccctgaaaaagatcacactccaggtgttgatcttctaacgaggagagagacacaacaaggatagtatggagaactacggtcagtgccatagcggaagagatcctgggggtcgctgagagaggtgcctaattcagctgctagaaaggagattccagggaaagctttccaaggaggttttactggcattccattttgaagaatgagtaggagttaattgtttaggttgtttttaaattgcttatctcctaagtagttttaagaagaatgatattttgaaattatcttgtcacgcacaattctgtaggtttgatcaaagaagacagttcttatttctcctctttccatctaacgtacatgcattcacactcacaagtttggtttttcaaatgtgtggctttactatcagatttattggtaaaactatattgatgtgtatgtatgtgtgagaatagatggtaggaattacgtataagatcatcacttcaatgtaaataaaatttaccttctaggccggtcgcagtagctcacacctgtaatcccagcactttgggagggcgggcggattcagaggccgaggcgggcggattcagaggcctaggaaggcagatcatgaggtcaagagctcgagaccatcctggccaacatggtgaaaccccgtctctactaaaaatacaaaaattagctgggcgtggtggcgcatgcctgtagtcccagctgcttgggaggctgaggcaggagaatctcttgaacctcggaggtggaggttgcagtgagcctagatcgcgcctctgcactccaacctggtgacagagagagactccatctcaaaaatgaaaaataaaaaataaaaaaataaaatttactttccaaagtcatacatacatatatatatacatacacacacacacacacacacacacacacacacacacacacacacatatatatatatatatatatatatttttttttttttttttttgagaccagatcttgttctgtgaatcaggctggagttcagtggtgcaatcatggctcactgtaaccttgaactcctgagcacaaaaatcctccttcagccttccaaatagctgggattacaggtgtgtgccaccatgctggactagtttttctttttatttttgggggagagatgaggtctcactgtgtttcccaggctattcttgaacttctggcttcaagcagtactccttccttggcttcccaaagtgcaagaattacaggtgtgagtcaccatgccctggccctagagtgtaattacatatttttcatcacacattctctctaaacacaaagaacacatgctcttaaacaagatccagaaacagacaattctactggctgtatctgtatttactttgaacacattatctcattatacggcagattcttcattgtaacaaacatccctaaagtggaatgaagaaaatgaatgcatgcgtactccacagggtattttctaggggagaaataactttatattctagcttggaaacatttctattctacaattttggagagaagataattgatatctttgcacacatatctttttgtctgataatgagatacatattttataaatattcatgttgctataaaccaggttggtcttagatgggataggcaagacctaactttggctattaatttaatttcctcacacatagaagattgttttaataaagatggtacataatcctagaggaaaagactcctttagtaagctgtatgattgtcttctttgagaagagcctctggcagtttagtagatataggcaaagatttatgactagtgactacattttctcccatttattctggaacgactttctactgattcttctaagatttatctttctaaactctaagtaagccaacgtgatcaccgtaggctataatgttcaatacttttcttcatggtgttttatttattttgcttatttatattgtgatatacttcacacttacgagaatattttttaaaagatttcttttctgcatctactatgcagtctaacaaagaaagcattaaaaatacagatgaagctctttcatgcatggtatgataatttcattgcattagatcatgcctcaaggtaaccactatttttaatttgttgtttaacctcctatatatttgcatacttttaccactgaaatgtgtattgctaaataatatatagtatcattttgcatattttagtatcatactatatatatatatatatatatatatatatctcctagcaacttactttttttaacctaacattgttttttggattatttttcccatattgatatatgcggttctactttattttcattgctgtatactattccattgcatgactttaccacagtttgtccattctcacattaatagacttagttttctagtttttctattgcaaacaaagctactatgaacatttttgtatttgtgtccttgtgtatgtacataagacttttctaggtcatatcacataacagtgaaattgttagttttggaactatgtggttttaaaattttataaaatgttggctgatcaacctctaaaacctcttgtaacaatttacacttccaccagcagtctccacaccatcactaacacttcgtaagacttttttgctttttgtcagtcttgagggtctaaaatggtatatcaattatgagttgctttacccggtagaatccaagagagaagaagttgtgcaagttttgtgcaagttctgtctcaagacctggcatatttgacttttgtacttgagagtcctgagccaccacggaagaaaccactgctagacagaccatgtaaagaagtcatatagtgggctgacacccagaatcacttaaagagatagagcaggccagccatgtcagcaacccaactgatccagccctcatcaacccagcagaagattgcagccacatgaatgaccactgacaataccagcaaaagtctcagctgagcccagcccacattgcatatctgtgagcaaataaaatgattgctgtttttaagctagctcctaaattttggagtattttttaacatatgaataaattcctgaaacatcaattaaaaatattttgatggacagttttttctttaattttaatgttgtcaaatatatcaatttatttttccctatagcttgtagtttttgtcttgtgtacaaaagcttcccaactcaaagattattaggatattccaataagtgttttaaatttttacctttcacattttggtctttgatgcaactggaatgtgtaatgcatatggtatgaagtggagcccattttttttcctagacggctaatcaatttccctaggactattaatgatataatccattcattcttcgttgtcttgcaatggcactttgtggcgttttttaagtatactggggtcttctttgagcatctttagttccactagtttattggcctatccttgtgccaagaccaaatacagtgttaaataattttagttttaaaataatcttgatatctgttaggaaacctctctctaacactactttttacttattctgacttctgtttgtttttagtatcctggccctgaatacttccatatacattttgaaataagcttaagttacaaaaaataaaactgttaagtttgactgaaattgcacttaatttgtagcttaattgaggagaaattacatcttcactatattctgtcttgtctttctattcatgaacatagtatatacatctatttacgtggatctttttaaataacttcaaattttgattttttttaccaagttcttgcatatgttttgttaatgttattgctaagtaccctacatttttgtagcaactgtaattattttctctgaagtcagctttaataagataaattaatataatataaccagaacctatcacatgtgtgtaatttgatgagttttgaaaaacatatcgctcacataatcactaccacagtcaagataaagaattgtttttttttttttgagacggagtctcactctgtcacccaggctggagtgcagtggctcgatctcagcttactgcaagctctgcctcccagttcaagtgattctcctaattcagcctcctgaatagctgagactacacgggcccgccaccacgcccggctaattttttgtatttttagtagagacggggtttcaccatgttagccaggatggtcttgatctcctgacctcgtgatccaccacctcagcctcccaaagtgctgggattacaggcatgagccactgcacccagccaagcatttttattatttaaaacaatcccttgttctctttcccagtccaccaaatcatctcttctgcccacgggtaagcaatgatatgtcttctgtaagaatagatcagattgttttccattgttttatacaaacagaatcatatggtatacattgtttatgtctagcttctgtcacacagcatgctttttgagatttactcatgattttgcatatatcaataattctagttctttccaaattatttgtctattcacctgttcatgaacacttcggttatttccaggtttaggctattatcttttaaactgctgtaaacatttatgcacaagtctttagattaattacattttcatctttttggggtacatatatagtagcagaatagtaaggtgtcatgtgacgtgtatgtttagcatttaaaaaactccaaaactgtttttcaaagtggctgtacaatttttcattttttatttccttaagttttcaaatgtcgtggcttaaatgtatttatagtgttattttatttgtatgtctttgctataattctacctttatacttcttaaatttattatgggtttttattatgtttttcttgatcaatcctgaaacagctttgctccttttagttgttttttcaaaaacaagtgttttaggtttattgattcttttattgtatttttcatttatttgaatttgccttttttcttcattattgttttctttcaatgttctctggatttatttatctttttctagcttcccaagatgaatactgtgatggtctttgatttattgcctctcagctccaaattcacactttaaaaaaagagaaaaggagttggccttataaatatttctcttttgcctactgagagatcttaagggacattgaaggagaaagatttttcttcctgcttctggagagggttgctcatcgactgctatagaatatgcctttttatccactgcttggcctgcacagaatcttcagggctcggtgctgatagggatcagctttatacagtgtttggctactgtgtgctttttgcagccattgacttaagcagcagcaacacagaccaaactcttacatagcatgggctacagccttggccaagatccctactccctgcactctcccctcagtctcacatgaaccaggcttggggccccagtggattggccatttaatgacattgcttcccaatcttaactcctagaagctgtcccagaatcactcagcccatactgtacaaaagaagaatgctagattcctgtagaggaaggcttctccagctcctggtttcactagcaaccattgcggtgacttcctccttccctccactctctaatctccctgcccactcactcttcacttccgtactgccccaaaccccactcttccggaatgcttctcagtgcctatttgtcattctaacttgtttgtgtcttgaaggtttattttcttcctgacacaaacacagcactattcttcattttcccagtgatgcctcaactccatctgatatctgtccacagctttaacttctctgcactccagagagttgttcctgcttgtctagccactgaggaccagctttggtttagcaatccagcaaactctttccttaactaactgagccacaaccatattttcctctacaaggtttgaacatcttttcaaatttgtctttccttgggcactcgctctcaggccttggatcaatttccattagagttctctgtctatcattatggtaactcttctatcataatcaataattctttatatcaaaatgattttaaacttcccctgatttctttctcctgattagattcagcctatgtaaataccaactaagtttccgtgtgttttctaataaaggcatttaaggctattaattcccctctagtagtaaattgttatatatggtaagatttctgctactgctagtgttctgtaacaagaattagctcatgtaagattggtaaataagagaataatgcttacataatgcctatattgttttggttcatacttttttaagaaaaccaacatgttaagattacatcttaccaaaagtaatagcagtaaaatgcaaagtgcactagaatagaatgtgaactaataatgctggatactgtcagctgtgggtgaacatagtgctataaatgacatttattcattccgtggccttctctttggcttaatttagtcatgtgctttctcgtgaaattgctattgtgtttttctttcccttatttttgtgcatttcacccttcctataattcagcacgctctaagctttctaacctaaccttatgttaggggagattttagaaaataaagttttatattaactatagtattaatttattaaagagtaaacatgtatttttaattatgctattgttttactgggattgttactatttttagtagtgctttagttacaaagttgtgtagattttaggtgttgtattccagacctatctttccaatataccctcttattttcagtggggagttttgcagaatcaaggtttcataggtgatatccatatcacgttacacacagaaggcccatattttcattctctttcaagttccaatctttcctaatttccttttgaatcatgagtaatgttaaaatatgttattttatttattattattattattattattattattatactttaagttttagggtacatgtgcacaatgtgcaggttagttacatatgtatacacgtgccatgctggtgcgctgcacccactaactcgtcatctagcattaggtatatctcccaatgctatccctcccccctccccccaccccacaacagtccccagagtgtgatattccccttcctgtgtccatgtgttctcactgttcagttcccacctatgagtgagaatatgcggtgtttggttttttgttcttgcgatagtttaatgagaatgatgatttccaatttcatccatgtccctaaaaaacatgttattttaaaacaaaaaaaggtcatgtgagcacagcaaggtggcagcagcctaaaagccaagaggaggcctcagaataaaacttatcttcctggcaccttgatcttggacttctcagcctgcagttttttgagaaataaatttctgttttttaagcctgtggtattatgttatagcagcctgaacagactaatagatcaagcttgttaattgttcaaatcttgattgattttatatctatacataaaatagctggagctctcagttaacaaaaaaaatgcatattgaactttcacaaataattgtagatttgtcttctgtgaaatttgatcaagttttgcattaatagttgtgagaaatactatcaagtacatacatatttagaattctagtagattcttggggaaatgtaccttttaaaattatgaagtaaatatcttcatacaaatgcttttgacatcataatccattttgtaagacatctttaaagccacactagcttagtttttccagtaattttcttgtatataatattcaacatcttaatcacattctaccttccattgaattttacaattttgcatgtacatcttgtaggcaattttattttaaaaatccattcttgcagtttctgtatatactgtcaaccctgatacattgtgagtcttctatttgttctactttttctgtgagtgtttttctattctatcttttgatatttcaagttttattttttttcgtttcactttcctaccttacaggttttcaaattatatactttctttatactttgtaatgactgttcttaaaattttaacatgtatgcatatgacacttaacaaactctaaaattaatcagcatatttaaggccaccaaatagcgcaccaaaatcatagaacacttcatttctagtttcttcccatcttatacgttactggtgtcagcttttagttccagcttacttcataagtcttacagtaattaatatttttattactttttcattcaatttgttgttgtatatatgcaccattgccacatttttgctcacctttatttttgtaatttcagccctaattcaatttctatcattgtgaaatattttctttagatgttccaccagatataaaactctaggttgattgttattttcactcaatatcttcagatatcattcaggtcttctgtttttcttacatcttgtgaagtttgcctttggcttacctgtcttttttttttttttttttttttgtaggttatctatctttcaattacagctactaggatttgctctttctctttggtatattaaagtatatcatactatgtccaggtttttatttctttttgcttattccaatcatgtgttttctgaacaggtgattcataacttatcatttctaggaaaaaattctaactcattatcacttctaattttgcctcttacccattctttctctttactcttacctttttttcttttctttctttttttttttttttttttgagacagagtctcgctctgtcgcccaggctggagtgcagtggcgcaatctcagctcactgcaagctccgcctcccgggttcacgccattctcctgcctcagcctcccgagtagctgggactacaggtgcccgccaccacgcccagctaattttttgtatttagtcttactttaacatcacttagatatacattggatcgtattctattttcctgatctctcagttttgtttatgttttccatctctttattttgtattctttattccagttaaactcttcagatctacattccagcttatttatctattcacctatgtctactcttctgcttaatctattgattgagtttttaagttggatggtaatttgatttctgaaatttctattgtgtttttttcttcaattctggcacgtattatttaatggtaaactattaccagtagtaataatttaaaataataaagaatttaaaataatattttaaaataatatattaaaaataatttaaaatattaaaaataaaatattttaaattctttatacattttaaatatacttgtttattataaaagtgagaattttgttatctgatatttttagaggcctgtgtcagctattgttgactctgtgggttctcactcattatggcctatttcctcatgagttatgtaattttgaaggtgagtttatttttggtgagacgttatctatgagaatcctctgatgttttctttttggaaatatatatttaaaggcagaaataatttttaccaacatgggacttctttatgttatgaggttatctggatcatgtgactcaaattcatgtccgtgtaaaaggaaacaatctttttctcctatctctgttaagtacattaaacctaagcctcctggttagtgaaatcagctaatttagcttccattccggttgctacctttagaatcttccttactcccttatccccttacccctaggtgttttgtttgtttgtttgtttttgttatttttttctcctacttgaattgcattgatttattatgtgctcagttataaatttaaagggtggttgttatatttaatccaatatatctagatgttttatattagaagttctttcaggttacttagttcattatgtttttaagccactctgctattatttttttaaaggcttctgtaacaagttctcattgaaacatgggttaatttatcacatttggttgaaaggggggaaatcctaatatttattgagtggctaaatgtgacaggcatggaagtgggtgctccaaacgacattttttctaactttaagtaattgacaacttatgtcttaagaaatgagttgtagccagtaaatttcaaagaaaaaaaggacccgtaagtcaagaacaatttccaaataatgaagagcaaccttgctttatatttcaggggtcttataaaatagtagtgagaagagaggattgtatcgaaggcaacattcatttatttcctacctggtttcaaggcaactttatttatgccttacactgtctaataagagagaaggaaagaacatttggccaacagaaagtattttaaaaatgatgggctgtcccattgtttaccctctaccctctgttccattattaagaattacttttattcagttattaaaatcagtgtttttctaaacttttctaggtgagaaatttcttaaatgagcactttttttctcttcattagactgctggcttcatctggcagaaggcatgtcttttcttcttcttcttctttaaattcacctttgttattatgtacccagcaaaatactagaacaaaataagcactgaataaatgtttcttgaatggaagactaagtgattctctctgttacagagctttcagaattggaggatcttgcttttaagatggacaccaccaagagattttttttcagtgaagctgaaaggaagagagttgacagtggcatggtcgtaataggtctctggatattaagactataatagattagtgatttgggaaaaggcagagaagattctgcatattgctttgaattattctggggattttgtccataaaacatgcaagctgtaaaccattcattggtcatgaaccaagtggtgcaatggaaagaacgtgaccattagaataaaacagactttgcaaaatcacaatgttcatttattaccacaaaataaattattttcttttgctccaggagaactctactgtagaaaaaccatcttaaaaatcatacagaatatcttctgtcttcatagatttctcatgaagattgttttgaatgaagaattcttatttttattcttactttgaaaaaatacttatttttcttccagttcaaagtataccacacttactttctatactaagctagaaaactaaataggaagaatcaatggagatattattgtacctccataatcaggtaggattcttttgtttgcaagagagaagaaaaaattgattaagccaaaagggaatgtattgtctaatgtaactgaactacacttagacctgacttgaaatattgggttcacacaatatcactggggctaagttatctccatttcttggtgctacttagctctgttattgtacttcttttgagttaattctgtggcatgctccttcatcttcaccacaaaatggctgctatgctgctatcacttacatttttcataacttcaggccaaatggtagaaaatgcaaatctctttcagtagcttttatgaagtcttgagattaattctggttggcttaacttaggtcacattctcactcaatcataagaattaagcaaatatgatgccctgattggattagtactaagtcatgcgctccagtccaaggatgagacagaattgactctgacaggagaacataaactaaaagtgatagagatgaaaatatagaaagattttggtatctgaaaacaacatatttctattactacctgcattagtctgttttcacactgctataaagatgctacctgaaactgggtaatttttttattttaaattttgaagaaacttaatttcctcatattctgctataccttactctgtatggaaaatatcttttttaaaatagtacattttcttaaaggttatgactcctatcttagagaaatttttatttttgcttattttaaaaaaaaattcctggactaataaatccaaaatctctgctatagctgagtctgatcctttttccttctgtatttcaatggttttgggggaaggagtggcgtttggttacatgaataattctttagtagtgatttctcagattttggtgcacccatcatctgagcagtgtacactgtacccaatgtgtaatcttttatccctcacccccccccaccaccctttcctccaagtccccaaagtccactgtgtcattcttatgcccttgtgtcctcatagcttagctcccacttttgagtgagaacatatgatgtttggtttgccattcttgagtgacttcacttggaataatggtttccaactccatccaggttgctgcgaatgccattatgttgttcctttttatggctgagtagtattccatggtgtgtgtgtgtgtgtgtgtgtgtgtgtgtgtgtgtgtatgtgtgtatgtgtgtgtgtatatatatatatacatatgtatatcccattttctttatccactcaattgatgggcatttgggctggttctatatttttccatttgtgaattgtgctactataaacgtgtgtgcaagtatcttttttgtataatgacttattttcctctgggtggctacctgggagtggggttgttgaatcaaatggtagatgtatttttagttatttaaggaattttcacactgttttctattgtggttgtactagtttacattcccaccaacagtgtaaaagtgttcccttttcactgcatcaatgccaacatcttttattttttgatttttttattatagccattcttgcaggagtgaggtggtattgcatcgtgactttgatttgcgtttacctaataattagtgatgttgaatattttttgatgtctgttggccatttgtatatcttcttttgagaattgtatattcctgtcttcagcctacttttttatggtattgttttttttcttcttggtgatttgagttctttgtagactctgataggatactcagcatttcaaacaacaagactggatgaagacagcatgaggccaactgaatatgcatccccccacttttttgtagtttacttgaaaggcaaaaatctttcattgtgtcaatgttacataaaaattgttttcaaaagggaaaaccaaatttcatgtttgcattactgcatctttaataataacacttcattttcataaaatttcagaaatctgtccagttttaattcatttgaccataaagtaagattttcataaaacttttagaaccctttacagttttctgttaaacagcagatcagttttctaagaaaaccctgttattcagacacatgggcccagattctggtcctgcatcagtgtgcttttatttaaatgttcaacctacagaaaaaagaaactaaataatccccttcaaatcttagctagcttgcttatacccacagaacttttttttttttttttttttacaagatcaaactatcacaaacccttttcaacttgcttacaccttcagttttgtcccattactctttcaggttaagacaatctttaaaaccctctgaattagacaaaattacatcccctttaacagaaaccatattcccatgccttcttataatcacccaccaaaaccatattctactttccttctataccttgcaactttgtacgtaaaactctttccctagtagtctcaactacatgttaaaatggtcactcttagcaacttttattttggtgaaaaacctgataaattagcaattttaattatgtactaggtgtggagactaggacatcagacagaagtgcagacaaggtctgactctttccagcatagccagagaacatggctaactccacatgtccccaggccttatctagaactaatgctacaaagtaggtaaattaaacaattttcaaaagtcaaagaagcagtttatgaccttaaagcacatagcaaatctgatatctggccttaattcagaccaaatgtctaaattttgaagacgcttttgttttaccaataggctttaaaactgtctttattcccaaacgattacttaagtcatgtgaacaaacaggcattaaagtttctatttttctgctgatatatgatttaagcacttatctttccaagacaattaatcagagctcttttatatataaacaccacacagacaacacatataaatacacagacagacggaagatccagtagttgtaagatttttcatttacttgtttcttagttgcattactggcttcagggtggagctcttagaggaacagggccaggaaagcttgcagtttctaggtcctaataagcaggcacagctggaaggcaaaaacagatcccccaaattaagggtgtcattttatgatgaatcctttgtcccgcaaaaggagagggatactatgggagaagatagtgtaatgcttctatggtgcatttcattgcaaggcatcccaaagccaatcagcccattttgtaatcagccaatcccccatggaggtctcacctctcaatgggtggtgaggacgtttccatgtcttctgggtggccaagagcatgcttctctaatccaagcgtgcaaaaagccaagtatttctcctcaactgccattagccatcccttaaaatatatttcctacctagttgttagacaccaaggctaaaagctctcccataatgcaaaataatttctgataccccccaaaagttaaaaaagtcagctaatgcagtgtgaaacagaacaaagccttagattttagagggatctattttctctcaattcctggggttccatgaggaaaatggaggtttttcctaaaatggggtctgtggcaccttctctgcttttccccaggagtcccaggctgttagagtttatcttaagttctctcatgttgacatcaagagtggcaagaagactaaactgggaaaaacaattcagtcaactgaaaaggaaaaccttttctttccttcagaaaaataagatccaagaagagaaaaaacataaaggtcttttaaatatatgtacagcttggatatcttattttaattaagctgattttaactacagagcttttttttctttacaaaaaatccttttaaatttcttattgccagactctagccaggatagccaatatttccggcttttgaattctaccacagaaaaccctccacataaaattaataagttttaaataaggttataacttaaccatgaaggcataaggtaaagtgtctcaaagagatagtaagtggtttctttcttctttttcttttctttctttctttcttctttccttttttttttttttacaagaattagattctcttcaaaggttagagagaggaaggagaaaggaaaataaagacagggaatcagaagcggcccatgagggaaaagaatcaataaatggcaaaaatttactcaaataacaaactagaaagtactcactccctaagccaagaattgaacctaggctaccatggtcaaagacaaaatcttagctactgagttacagcattgagcagtttctattgctcttctgagaaggtgcctagaagccaatttagagcttgcaaaggctcttaaatgctcaagataatttttagggataactatgacatgaacccccaaatttctgtcctattgatggcagaaaccaaggcttcagcaggcttatagggatcctaaatccacgtcctatcctgtgatgcccctctctccattacagaatgacacaaaaagacaaattcttagtacaaagcacaccagatttgttatagcttaagactagtctcacagatcctttcttctattaatcaaatgcttgcaaaggagacaaatagtgatgtttaccatttacacatgaatacacaaacagagagtgtgagagactagaaacttgattggtaagaatttcataccctttttgctagcataccaggtttccaggttccctttctctgcagcttccagaagaatggagcggcttttgagacatttctcactgcgccatagttgtgggggtcaagccactttacaaaaaaaaaatcacccttatctgttttacggaaccataggcaagagattctcaattttgcaagatgctcccaacaggctacatggggaaccaaattaacattttccatcccagccaaagcaaaatacacatgacaaaacagacattaatcacctcattcagcaaccaatattgaccaggcaaggctcaggctttctcctattggtccctgttgtctttgatccattccaagtagggagggatgacctccaaccgataattcaatgggtggtctctgggcaacatgaagagtgaatagtcaccccaaatcagccctgttgagctttcctcaggactcaccaaatgtgaccagaaaaataaggaggattctctgagttaggcctgctagacttctgtcagcaattccttctgacacacacaaagacaagatggacagaaagccttccaaatcaagatccctaaccaagaactcccaagagtatcccttccaaaccatcttcctattctccatctaagaaatctctccaagatcatcctgattggggagaagtctcccaaaccaagactcttcctactaattagggagagccaatcaagacccccaaaggagttgaaccaagacagagaccctgcagtggggctacagacaggcaccccaccatggggctacagaaaaaccgagacccctgaaggagtcaaaccaattgggagcaggaaggaggcattggcagcacctgggatactcaccaaactagacacctcataatggggctacacctacagacactccatgactgggatacagacagacaccctattttatgactacagttacagacaccttgctatgtagctatagacagataccctatgacagggctagttatgggacatctccccaggactctttctctattgcaattaaattcatgcacattgggttggcagcactgcagtaccagagtcagcctccagtccaagagaactatgtggccgtttgggctggcctctgtatccattgctggaggggagctactgaaccacaggcaggtagccacaggggcaatcccagataagcccccagatttgtaatcttccaatgggttcaccttgcccactgcccggacagagccagtttatcaagacagaggaattgcaatagagaaatagtaactgcaaaagagaaagagtaattctctatctctcatctgtgaggaagacttgagttttattattactcaaatcagtctccaaactgggtaatttataaagaaaagaggtttaattggctcacagttctgcatggctggggaggcctctggaaacttacaatcataatggaaggtgaaggagaagcaagttccttcataaggcagcaggagaatgagggcataccggggcaactgccacttttaaaaccatgagatctcatgagacgtccctcactatccctagaagaggatggggaaaaccacccctatgatccaatcacctcccaccagctccctccctcaacacatgggaattacaatttgagatgagatttgggtggggacacagaggcaaatcatatcactacctgaccaattgactgctccacatctactatacatctatttctcttaatctatgtcacaaatgttcatgtctatattaaatgtcccaaccctgtccaaaaagggagacaagtgaactcttagctaatggtaaagtcaagatctctggatgatgtgtaaatcatcttagtcaattccaattttagatcctcctacttttctatgtgtggataattgatacgtgtatctattctccaaacacttaatataagattaataaaaaagaacatgattactgcaataaaattgggactagaagaaaaagtatatggattattacagggttatatgatatgtagtgttcttctaggaaggaatcacaatgaatcactgccctgggggaggactgcgttactgggtcagctagtttgggcagcccccaggtctattcttggacgaatcttcctcatccatggtcttctattcctgcatttgaggcaattattgaacatggtctaagtagacagagatcataaaccagaacttttcaacccattttgtaacctttctgatacttcatcaggtagctcacaagcccctttccctctatttgactccaagctctttgaggggagagactatgttttacttaccatttgtctccaacataaagtactgcgatggttataaaattagcacttaataaatgcggtaagaatcaattagtgaatgggactgataaagtgattgactaacagaactagacaggctcctgggaaatgacctggtccttttcagaaaaataattacctaaataagaataatagcaggccaaaataattatttattttatgcaatacaaagtttgttatgttttatttcacataggattgaattttcttctgggattactatgtttattaaatagaaaaatcttgcagaagagtccaaatcagattcctatataaaaaatattgacgatttttaactacctctttggaaatacatgtactttttattcccaagtcaatcaaacatctgaaatcatataaagatttaatcacctacatctccatggggctattgaatttagttggtgtttttgaaatcaccttttcccccttgattgcaataatttgcaaagcaattgcctatttataaattctattatatacattgcttatttattttttattctttctacaaaggccagagcaaaccgaataagatagttatcttcttcattattttaatatctctatacctgagagaggaggctggatgttggcaggaatggcctttggacaatggccaatttaatctggtcctctctggacttgttaacaattacaagacccactaggatatcactaatgttgtggaaatatttgtgtagttaatttcataatttttattattttttgagtaatttgttgcctctgaaacaaactattctaaatggtgtttcacaaacttcagttgtttatgaattatgtttatggtttttgcaaaattctgaagaccatcatatctttatttttttaaacccaattcacatttttacttaaatattatttaagaaatatttttcttattaccaaaatgtgaaaacatcctttttaaaaatatcttctttcataaacagactgtaatcacaaattcaatataagcaaataaaaatcattaaatcataactaggtatttgtattagtacattcttgcattgctgaaaagaaatacctgagactggataaattacaaagaaaagaactttaattggctaatggttctgcaggttgtacaggaagcacagcagcatctgcttctagggagacctcaggaagcagaagcagaatcatagcagaaaggaacaggggagcaggcacattacctggcaaaagcaggagcaaagagtgggggacagtgccacacagttttataccaacagatctcatgataacccactcactactatgaggacagcaccaagggatggtgttaaaccattcatgagaaatccccccccatgatccaatcaccccctaccaagccccccgtcaaacattagggattacatttcaacatgagatttgggtgggaacacacatctaaacatataattccatccctggcccctcccgaatctaatgttcttctcatatttcaaaatacaatcatgctttccagtaatccccccaaatcttaattcattccagtgttaactcaaaaacccaaagtccagtcttagccaagacaaggcaaattccttcttcctatgagcctgtaaaataagaaacaagttagttacttctaagatacaatgagagtacaaacaggtaaacattcccattccaaaaggaagaaattgagcaaaaaaggggctacaggaacatgcaagttcaaaatccagcagagcagtcattaaatcttaaggcccccaaataatctcatttgactccatgtaccacatccaggccacactgatgcaaggggtgggctcccaaggccttgggcatctctgcttctgtggcgttgcagggttcaatccctgcagctgctctcatgaactggcattgagtgcctgcagcttttccaggaacagggtacaagctgctggtggagccaccattctggggtcttgtggatggtggccctcttttcacaactccaccaggaagtaacacactggggactttgtgtgggagctccaaccccacatttcctgtctccacactgccctagtagaggttctccatgagggttctgcccctgcagcaggcttctgcctggacatccaggcttttctatatatcctctgaaatgtaggcagaggctcccaagcctcaacccctgtgtactctgtgcacccacagacttaacaccatgaggagaccaccaaggcttacagcttgtaccctctgaagcagctgtccaagctgtacatgagccttttttttttttttttttatgaggtggagtcttgctctgtcacccaggctggagcgcagtggtgcgatctcagctcactgcaagctccacttcccaggttcacgccattctcctgcctcagcctcctgagtaggggactacatgtgcccaccgccatgcccggctaatgttttttgcatttttagtagagacagggtttcaccatgttagccaggatggtctcaatctcctgaccttgtgatccgtctgcctcggcctcccaaagtgctgggattacaggtgtgagccactgcacccagccacatgagccattttaagaagtgactagagctagagtgaccaggatatgtggagaagtgtcctaaggctgtgtggggcagcagatccctgggcctggctcatgaaaccatcctttcctcttagggccctgggtctgtaatgggaggggctgccttgaagttctccaaaatgcccttgaagccttccctgcctctcccattgtcttagctatcagcgcttggcttctttttagttatgcaaatatctctagcaagtggttgctccacagcctacttgaattcccctcccaaaaaagctttttctttctctcccacatggtcaggttgcaaattttccaaacctttatgctctgcaacccttttatttatttatttattttatcctttttttaaaaaaattattatactttaagttttagggtacatgtgcacaatgtgcaggttagttacatatgtatacatgtgccatgctggtgtgctgcacccagtaactcgtcatttagcattaggtatatctcctaatgctatccctccccgctccccccaccccacaacagtccccagagtgtgatgttccccttcctgtgtccatgtgttctcattgttcaattcccatctatgagtgagaacatgcggtgtttggttttttgtccttgtgatagtttactgagaatgatgatttccaatttcatccatgtccctacaaaggacatgaactcatcattttttatgtctgcatcgtattccatggtgtatatgtgccacattttcttaatccagtctatcattgttggacatttggattggttccaagtctttgctattgtgaatagtgccgtaataaacatacatgtgcatgtgtctttatagcagcatgatttatagtcctttgggtatatacccagtaatgggatggctgggtcaaatggtatttctagttctagatccccgaggaatcgccacactgacttccacaatggttgaagtagtttacagtcccaccaacagtgtaaaagtgttcctatttctccacatcctctccagcacctgttgtttcctgactttttaatgattgccattctaactggtgtgagatggtatctcattgtggttttgatttgcatttctctgatggcaagtgatgatgagcattttttcatgtgtcttttggctgcataaatgtcttcttttgagaagtgtccgttcatatcctttgcccactttttgatggggttgtttgtttttttcttgtaaatttgtttgagttcattgtagattctggatattagccctttgtcagatgagtaggttgcgaaaattttctcccattttgtaggttgcctgttcactctgatggtagtttcttttgctgtgcagaagctctttagttgaattagatcccatttgtcaattttggcttttgttgccattgcttttggtgttttagacatgaagtccttgcccatgcctatgtcctgaatagtaatgtctaggttttcttctagggtttttatggttttaggtctaacgtttaagtctttaatccatcttgaattaatttttgtataaggtgtaagttccacctttaagtaatttatttgctcctgcatatgagtgtaggatgttagaagcatccaggcccatcttgaacactttgctgcttagaaatttcttctgccggataccttaggtcatcactctcaagttcaaacttccacagatccctagggcatggacacaacgtagtcaagttcttttctaatgcgtaacaaaagtgacctttgctatagttcccaatacattcctcatctctatctgagacaccgtcagcattgccttcactgtccatatcactatcagcatttggtcacaaccattcaaccagtctcaaagaaattccaaactttcctaatcttctgtgttttcttctgagacctccaaactcttccaacctctgcccattacccagttctaaagtcacttccacattttcaggaatctttatagcgattccacaaccctcagtactaattttctgtattagttcattcttgcattgctaaaatatctgagactggataaattataacataaagagattaaattggctcacggtttcacaggctgtacaggaaacagcagcatcttcttctggcaaggcgtcaggaagcttccaatcgtggcagaaggcaaagggggagcaggcacatcacatgacaaaaggaggagcaagagagagagtggggagttgccacgcacttttaaacaaccagctctcacagtaactcactcactatcatgaggacagcatcaggggatgatgttaaaccattcgttgaaatctgcccccatgattcagtcacctcccaccaggccctaccttcaacattgtggattacatttcaacatgagatcagggcagggaaacacatccaaactatgtcagtattgtttactactaaagtatgggagcttgagatataattaaaaaataaagattagctcatgttagacagatgttaaataatatttagtcttaaattgaaacttcctctttgacatcgttgggcttgaaagaaaagaaaataaagttctcactatctaaattcatgttattttttactgtgtcctttgatatggtttggatctgtgaacccacccaaatctcatgttgaattgcaatccctagtgttggaggtgaggcctggtcagaggtgattgaatcacgggatgggtttctcatgaatgatttagcaccatcctctaggtgatattttcaagatagtgagtgagggattgtgagacctggctgtgtaaaagtgtgtagcacctccccccagctctcttcctcctgtgctagttatgtaaagtgtctaactccccctttgccttctgccaggcttgaaagtttcctgaggcctccctggaaactgagcagatgctgccatgctttctgtacagcctgcagaaccatgaaccaattaaacctcttttctttataaattacccaatctcaggtatttctttacagcaatacgagaatggactaatacatcctgttatcaaatatcatgtccaatgttacctaaagccctttctaatgccaatatcattcctgtttcccaattttgggaaatagcattctgaagagatattttttgtatacattgtacacagtagaaaattgtatgtgtatctatgtatgtatgtatgtgtgtgtatatgcatgcaatgtgtttgtactatagggatgtaagacgtctaaagcttatagcttgtataaatgtaaaaatattcttacagagttagaccaacaccctcaaatgaaatgttatgtaaactatattttgtataaatattttcctcagctttctgacttaactgattggtttttactgaaataactttatagtctcgtatcaggaataataggattttctcattttcttattaccaaaaaaacaaaacataacaaatgctggtggtggagagaagaaatctcttttacaatgttagtggaaatgtaaattactaaagccattgtggaaaacattatgtagttttcttaaaaaattaaaaatagaactatcatacagtctagcaatttcactactatttgcttcaaaggacagaaaaaatatatatcacagggatatatgcactcctgtgtttattgtagcactattcataatagccaagataaggaatcaacctaagtgtccattaaatgatgaatggagaaacaatatatgatctatataataatggagtactattcggacataagaatgaaatcttgtcatttgcagtaacattgatggaactggaggccattatgttaaatgaaataaggaaggcacagaaagacaaatattgcatattctcactcataggtgggagctaaacaattttgatctcatggagatagggagtagaatgatggttgctagaggctaaaaagggtagtggggagcaggggataaagagggggtggttaatgggcacaaagatagagttagatagaaggagcaagatccagtgtttggtagcataatagagagactacagttactaccataatagagagactacaataaattacaatcatttattatctatttcaaaatagctagaagagatttgaaatgttcccaacacaaagaaatgataaatgttcaaggcgatgagtatcctgaataccctcatttaatcattacgccctttatgcatgtatcaaaatatcaagtgtttttacaaatatatacaattattatgtatcaataaaaagtgaaaaataaaaaaggaaagatttgcccatgttcaactgagacaacaaactttaagttaattccgatttttgttttattaacttccgcccctgggtctctcctttatttccttcctcccctttgactcagaccctaatgtattccccactcgacagtcagaatgatcttttatgaaatcagataaaaatcttggctctgctttaaaaccttccatgagtttcctgtgcagatcagaataatatttcacatgcatgcctagacttgaagctcttccatggttggcctgcttcttacctccattgagtctctctcctctagctcacaagtggagtcacactagcttccgttttgtttttcatacatgctaggctttttcctgttttaggtcttttccacttactgtttttcttttctccctggaattctcttcctctgaggttttacttagctgattctttatcttccttaagtcttgagttaaatgtcttttaggttgtccctgtataccctttataagtggatcatccccttacgtggtattctctacctatttcctccttatgcttggtaggttggaattatatatgtgtctcttgtttattttctacttccctataagagtctaagttctatgagggcaaggcttatggttatttgcatacactgtctcagtattatccttggtatacagaagtactcagtaaatatgcatatatatatacacatctatctatctatgtagatatatagatatctacatatgtagatatagtaaatgaatcctcttcaaagagttgttttatttgtttcattggcttccctgattataaactcacttttcaatagtttgttaagataggagtgtgtgccacgtttagcattcagaaagatttgagtaagcaattgaataaacagcttcccctagtttgtaataatccttaaaacattgtagtgactgagcataaggggcaccataagcatcaaagagagatgaatttgtagcatcaaaggcaagccagcaatactgttttaaatcttcttctaatgacctccttataattatgaatccctaagaagaaattcagctgctttctatgtctggaagtctgcttaactatgcttaattcttttgctttggctcatctccaaactctgtaactttctttgcctaactagaattgcatttggactttgggaggaaacagttattgttatgcatttgtaggtgtgagcaccagctgcttgtggaaattccaattcattatacattcgattttataaaagaataagcaaaactttgaaagtatggctttagtccttacagttgaaactcaagtatattattgatttattgtggaaatattaaacaattggccaaaattttgatgtgtccattacttcattaataaactaaatatattcatttattttttttttttttgaaatggagttttgctcttgttgcccaggctggagttcagtggcacaatctcggctcactgcaacctctgcctcccaggttcaagtgattctcctgcctcagcctcccgagtagcttggattacaggcatgcaccactatgccaggctaatttttgtatttttagtagagatggggtttcaccatgttggtcaggctggtctcgaattcccgatctcaggtgatccgcctgcctcagcctcccaaagtgctgggattacaggcatgagccactgcacccggcctcatttattcttatctagtttccacaggggccttacttaatatttctgaaaaccatctccaaatacacataatgaatatttttgtagaacacatacatacacactggggacttttttcacattttgcatttataattgtggcagatactgccagctgaccactaataatttcttcatcccttccatagtatggagatgttgctggacaatggctgccccttcaaggactattatttcccagcctctcccccttgcatccaggtagaccctgttaccgatgcatgtctacgttacctctaggagacaggtaaggttgcaatatgtaatcctcagtgttcccttccctcaggactgctggttgggtaacactgatgcgtctttgctctagccaaacaatgtaatatggggttcctgaatcacagcctgtgaacaagatgctctggagaaggaacatctgctttgaacttcacataaatgagaaatacactttcagtttgttatgcaactgagattctgagtttgtctgttacaacagttgcaatatttaccctgatgaatgtaatgtaaatttatcaaataaactctataaatatataagtgtaacatatctgcatacattattacagagctagttcagcactcattttacacatgagaaacctgaagaaaaagagaccttgaagagttaagcaaactcagattataaaatacattacttaacagctaaactaattctagtgcttattccattatagcaggagtggacacagtatggccctcaggccaaatcaggtccactgcctattatttagaaaaaataacgtttactgtaacccagtcacaatcattcatttacatattgtttaagactgccttttttgcaacaatagtagagttaagtagctgcaacagaggtcatatgacgagtaaagcttaaaatatttactgtctgactttttacaaaaaaggtggctgacccatgcattgtactgtatgtccacgggctttccaggttaattctgcatacgggacataataaaaaggtaggctctaattttatattgtaatcacctggtgggttcttgcttgctgtacagataaaaccaattcactgagactgtggtattgcaataaagaaagagttaattaatggtaggttagacatgcagaagaaaaagttattacatcagtctcttggaaggcttggaggtttgggtttttgaaggatggtgtgatgagtagggaagtagggaatggggactactgattagttggggatgcaatcacaaggatgtagaaaacagtcctcatgtgctgagtccacctctgggtggggaccacagatgaactgagtcatgagtcatagtctagatggggtcagtcaactgccagaatgcaaacgtttgaaaagcatcttgaaatatcaatcttaggttctacaatggtcatgttatatataggaacaattggggaagccacaaatcttacgatctttggccacatgtgtcctgtcagttagggattatagaaactatgcctacattttagcagagttcaggcccatcccataatcctaatctcatggccttttattagttttcagtcctttagcaagaacaggggtagctttcggggggattattatcatctttgcttccaggttaaactacaaactaaatttctcccatgttttcctcggcctatgcccagaaatgagcaaagatggtcagcctgtgaggctagaagtaagatggaaccagccatgctagatttctctcactgtcataatctttgcaaagatagttttaatatctctcctattttagtggaaacattggaaaatccttcaatttttttttcactttctctactttgtgcactaacctccttcttaactaatatttggaaactgatccagcttcctctcatgcttctgatattatctaagatagggtcctatgaagcagaactttaaaatgaaatggtaaaaggctaaggtatgctttcccatctctccttcattgctatcccaatgctgagactgagcacatgccaattagtgcattcccttagactctaccctaaggcctctaatcaaatgcccaggaaaacaagatcctcacatttctattaaactcagaaaaagttttttctttctccagttctttctgtctacgaagattccatctttctctacaggagtgtttctctacattttttatacattgtcactcaagacatatgatcatgtttgcattgataaagtaagggctgtaggcactgtcaaattcccaacttatatatacacaattccagcactttctctctcacttttcaaaaacacatcagactgcaagaaagaagtcacttattatagaactaaccttaaatccattataagttattttttaaacattgcattaaaacatcgataattaaactatcattaatcaaaagtagttgctctgtctctcatagctggttctgacaaacaagcttactgtaatactatgtatgaagataactgaatctatatgaaaaggaagaatttgagaggctcataaaaaattctgtttcctcattgtgagttgcagtaaaaattgatttaagcagataaaactcaaagaaagcaaaacacctcagatagtcctttttggtttatttttgaaaaagtgaaataggaaaaaagaaactgtttctaagtagacttgagagggaacaaacccagatcataattcaaagacaatgctatcagaaatcttacattctaacttatccttgggttgacaagaagaaataaaagagataagtggcaaatggctactgatgtgtttctaaggccctattataccagacaccctcagtttgtagcaatcatgcctttcaacttgtcttcctcaactctaactctcacaactcctgcattagcttaaagctgataaactctttgttctaactgccccttaagcagaggtagagttggaagggaaatttcctatccagctgcagcaaatatggggtgtgttcctggcatttttagaaaaatcaataactgtagtttccagagaattgttgttatacacaatacatacttctcataatttattctataatactggtatattgtgggttaaatttatttctttagttgacccccaagtatggcaccatggaaatcattgtgaatctaacaaacagccacctgcaaaatatattttagaatacaactcactgcaagttagaaattgcctcgacatttttgtttcataaagaaaacttgttttgcaaagtggtgaagactgggtagtcagtcttggatgcaatccaagtgcatttatttggtgacataatggcaactaccataacaaaagccttttataggtagtttcttctacaaattagtcctaagttgtggcattagtgagaaaaacactcttcgttttatcagttttaatatgaattcaaaaatttagaaccccatgtacatcatggcaaatgctcctaattatgaagctaattgtccctgcaatacattttactactttattttattcaaaatctttttcttgggtccatcaaagacagctaaaattatgcactcttatgcatggtataatattggcagtatatcattctttattaagtttttgtctttattttgacaactagttttaaatgttggccaagtgatgacttttgcaactaatgtgaaacagttgctgtgagcttttttaatttgacaagctcatgtctaaaatgttaataatttttccagatagtagaaagtaaataaagttgtatgctatcataagaaatattcatatgtggataatgacacaagaggataattttaaggatatttataatgcgatgtgatgacagtgacataatattttttatttttattactggcttcagtcactatgtctcttatatttgtaagtactaaattcacaattttttagatataagaaatcaagctatgggtaaataatattgtcatttcccttgatatataataacatttccttcaataattcaatttattggaagatatactaagggcaagcaaagaacttttggattaatacaaatattttctattattttcagatatcttcttttattgtatgaaaagtcccctctcctttttttttcttaaatttgttaatgctcttctttctgtttcataggaataaatgtttatccagctttccaaggctgaccctatgtgtttaccctttattctgagtgaagatataagttttaaacttgattataacttggcttaatatttgagcaagcaattttactgatggtggaacatttaattttgctgatttagggcaatatcatcatttctagaaaaaaaatcagcctttttatataaatattccgtgatatttatttcttgttatttggggaaggatgtttgtcttatggttacttttctcttgacatgtgctgatgatataatttatcttctattttcttgttccttccttatcaacttcatcctttactccccagatgcagattaacataaagataatgaaataagcatcaggtcctctcacttctcaggccccgtctaaggtcctgggggagtcctagttaagtattaaatggtcaaatatatttttgtagaatttagaaaagtaagatagtttaaggttactgtgtcttttcatactaagaataatgacaagctcttataaagagtcctgatatttaacaaagaccacagaagtagaggtggagagagagacagaattgtgagatatttgggagatagactgatatctctattctcatgatctattttctaaccagcttgaacttatctgtacttcccaggcattacctaggtgttttcacctctgtgccttgacagttacattttctctcagcctggagtctctctcatcccttgaagtccagttctgatgccaactggcatttctctagtgctaaacacatagtcagctcttagtgcatagtgttgactgcagaaattaagctaaggcatgagtcttcacatgattttctctaaatctgaaaacttggctttttccttcttttcttttcttgctttggagtggggaagagaataggacattagccacagcttttcttaagcaaaggaagcactgttcagaggagacccagcattaccccttgattttgataaagtccaaaggcctctgatcttgcccttggcatcactgattgttttggaaccagaccacgtacaggtgtaatttttggagggagtcaaataaataaaggtgtgattatggtatgaggatgaagtactcccacaacatttgctctttgccacataggagtatgaaaagagttagaacttagaacaactgacttaaaattctgagtattccacttactagctgttttaccatgggaaaaatatttaacttttatgagttttctcctttggaaaataatgatagtgtagaggtggagggagattatcttttctgcctactgaaggttcaccgaaaatgaactgacaaaaggcagattaatatgagaaaggtgtacaaaatttatttaatgtgcatgggagaaaatcgcagaagtgtggttatccaataacccaatgaagcccagatgcttatatacccttctttatagggggagatgtaaaatggcggtgatttttttgaggggtagtgattattagggagaatgaatagatccttaacttgtaaatgattccctttggaatttgaatgaactagatgttatcttgtgaaaaagtctgtccaggtgtggttacattcctcaatcttcttttctgtgacagatgatgagatttcagggaggggatagaaggcaattgtgttctgtttggcaggtgcagtcttaaggtagataggggaatatcagagtagagtctgttccagcctcttctgacttttaagggtctttaatttaaagcaatcatcatacaacggtgccatatttaggagtgaggttccctgggctccttcaattgcatatttctatctattggttttttggggactataaaaaaggagtatatatctaaataccttgttcatgctgtgcgtaataggaattctatgtaagttagttttcttctttcttcttccactttttaccttcagcatctttctaagtcaacatgtgattcaagcaacaaattcatcctggtagattttaattaattaaatttatattgtatagattactttgtatgttcacatacactatcctaatttgtcttcttactgatgtaatgaggttagctgaggagtcagagaaggtaccaaccaaaatgggtgcacccttcatgcacatacacacacatacacacacacacatttagacatgttggtgtgccctagataattattatccaatttttatggataaaaaaaactggggtcccaaaattcaagttacttacaaaagctgacaagtcccttctctttacaccgtttcctgtttttcacctgtttaactcctgtttgttctgtttgtccttcaagggtcactcatgacagtttcttcccctttcctgtcactaccacctctgccagcctgggtgaggtgccccttgtcttctgtgctcccattgttttctgtacatgtttatcatagcccttatcacactgtgtatacttgtcctccaattcactgtatactccttgatgaaaaagaacgttactttttcatggtctttttgcacagtgttttatatgcagtatgttaaacattacctgctgaatgaaagagcaaaagttaatggtgattgggaaattgaaattattcaggagcatgtgttaaaaaaatctaaggattctttagatggaaagaaccaggatctattaatttttgtttgtgaggtaaggggtgtgtgtgtgtatgtgtacacacatgtgtgtaaagacaaagactactgtttaattattgatgttaccaaacaaggcttggatctgtgtgcctggtacacaaaaaaaggcaaacataccaggattttcagcaaaagaaagtgagtcatttattacaggtcaccaagcaaggaagatgggcagctaatgctgaagatctgaacttcccgatgacttacaagcaacggtttttaagacaagagtacattttaagaaagcggaagttacaggcaaaatcataaatcaacataaagagtttatatatttgcttggcccaaaaaggtgggatatcttgaagtagggctcacaagtcataggtgaatttagagatttgtttttgatttgcaataggctaagggagcaatgctttgtttaaaagcttggggttcaacagaaaggaatgttaaggtttagcctgtaggcatgatgctccccaggacccccaggaagaaacttagggcaaagaatggtgatcagatactagttcttagtttttctcttatctgaggtatatgtgacaatgtttggcatttttctttctttctttcttttctttttttttgagatgaagtctcactctgtcacccaagctggagtgcagtggcatgatctcggctcactgcaacctctgcctcccagattcaaatgattctcctgcctcagcctcctgagtagctgggattacaggcacctgccaccatgcctagctattttttgtatttttagtagagactgggtttcaccatgttcgtcaggctggtctcgaactcctgaccttgtgatctgcccgcctcagcctcccaaagtgctgggattacaggcgtgagccaccaggcctgaatgtttggcatttgtcatttggagagtcctggtttctgaaaaacaactcaagtccatatgttcagatgtaatcttttagttttcagaggcaaccaaaacaccatgtgactctgacttgcttgggaggctattgttgaagttattgccatcttcttggttatcaggttgttcatttatttttgctaactaggtgcctagaattgtttcaaagggactagagatatgtatttttaaaattttatgcttggggagaggtcccagcaggcccctaagaggggtctttgctttatctcattgatacgggagactgtatcaattctttatagtacttctaagctagtttaattggtgtatacagaatatgtcatgctaaaatagacattgtgtaggaaccaaggcctttggccctgtaaagtttccctgaaaaatcaactaaccaaagactgattaattaaagaaaaggcataaaaacttactgtgtatacacaagaggtttcagaatgaagagtcaacttcccaaggagatacagaagcttatatgccatcttgaggttacagaaagaataagggcttagattctcacaaaaccagttatgggaagtgggagaagaggaattctcttgaggggcaataaatgattattaggaagaatgaatggatagagaacagaggttaaatgataaacagttctctttggaatctgaataagcttgtgaggcattatcttgtaagagttgggtcagatatgattacattctttgtcttgtctctgccatagataatgagattatagggaggaggaaaaaaaattgttgtccttggtgggcagagacttaaggcagataggggaacttcagacaactttaccctgtgctttgggagaaacagtagggagtgggaacatgccaaggggaccttgaggcttcttcaatttttctgagcaacaacaattataatccttggagaaaaataaaagtcacaaaaaatagagtaaatgttatttgtggaaaggggaagagtcaaacttatccttttgctcttctaatggtgcttgacaagaatgaatcatagtaataggaaggtagactcatccttcctaagccatcaaaagaaaggtggctttcttcctcttccacaagcaattttgcttaaaagaagacaggaagggagtggcttcttatatggatatggggaaactttgataaatgaatctgattctaagtgtggggaagggagaaaagtagaggaagattaagttcatatccaaaatgactccttatttttcttgattctctgtaggcgcttttagagagagagctgggcactctgtggagtttctttatatgacctgaggccttactctagtggcacagttaatactggtgagaatcacaatagactatatttgcattcatcctggggacagctttgaattcacccacacattgtaataagtagaacgtttgcccacagatttcacattgctctagtgtcttaatgatcttcccccagtgcctgtgatagacttaaacataatagaagccaattttgactcgaattcaatgttctctgtaggagaggatgactgaagtttaattataattcctttataccaaatgtgtatgcattctccagcatttgatgggattcctccaaaatttccatctcaaaatcagcccatcagtagaacagtcacatgctgcccagttaattataatggaatgtgatggtttggggctgtattccaaacagagcaccatgacatctatgcaaacaagcttctgaaaagctaataagacaagggtctttgtgctatttcaaatgtttttattttgttttgttttttctccttatgtaaatatgccaaagatggactaacaaaaaatgttggttatgtagttttttgttacatatgtaggccatttcatttcccctcatcttctctgtttcctatgtacagctaggaataaaactcacagttcttccaagactcagaagtttaagacatattctagcacatggtggatttaaaacatattcactgttacttttgaaaattacattttcccaatataagtaccttttagaagagtgcataatggactttgtagtaaaggcaataatcagtctttatgtttattttgtgtctcctaaatcacagacctgaataaaagatgctacatagaaaactgtatttcataaattaaattgatactttgtggattactatgtatgtttaacatacatgtatgtggaaggggatggttgaaggtgtattccccaaataatacaacagagggactttaacagagaaggcaggagaagtatcaatctgaatggacactataaaaaatgttgctgggcaacttccagaggtgcagcaaggatggaaacacttttaaagcactagaaatattataaaatgagcaaaagtatatttgtggacctggtctggtacaggtagaatatgaacatatgaaaatattttgatgagccacttggagctgaaggtaagattgcaagaggtgggcttgagtggcaataaataatcaatacactgcctctaaggaaggtgggcctggttagccaaaaagtttttattttctttaatgaatgatggtttgagactttttcatcaaagatgaatttttcagggaaatagaagacaaactaaacattactgttagagtaggcagacagacatgagcaggaaagcgagctcccaggggaggaagctctagaaagtcttgcatcccagagaccaccccaaacatgcatgctaactgagcagagaggaagggaaatacctatggcagaacagaacaccccttaagacacccagtaattactcattctatgattgagctggtcagaatatagctagctacatgctgataagaagggacaagggacaaaaggaaaattcctgaaagacgtgcaggcacaataagtacagatttgaccactatatgaccttcctggggtggcagtaattagcaacactaccattaggtatgattcatattgatcatcaggccccacatatgcacatctactgacagcaagggagaatccaacaaacctgggcaggaacttggggataacaaaggcggagacttaagacagaagcaggaaacaagaaaaaggcagagacttaagatagaggtgggaacttaaagaaaaagtctgacataataaaaacttcaacacagaactctcaggactgttcctagccacgtgagcctgctcctctcttggagtgtacctttatttccttaataaacctttttggctcctttactaattggtctcttggctgaattatttccttcaagaagacaagaatctaggatccttcacttcctggtaacacgaagaaagtgctctttcctctatatccctctctctcattgtgctcagtattatctctaaataaatgttggataaatacctaaataattccagtttgttggggttcaatattatgcactggacttacattctcacaagtccatttctctagcccagtgtatgcacagtttcagccaattaaggacttaggttctagttgcagagtgacacagaaacaaattattttctcttcaaatgagtgtgcttgtataaagagattcagaatcagaagtgtaaataaatccaaaagaagcattaatatcctcttctacttctgtacaggtattacaggaacagtctggtgaattgttgccttggcttattagtttcaaaaggcttaaaaaagtctaatctgagattccttatgaaaaagttctagcaaagccaatttaaaaggagcctatatgggcaatcactatttttgttgaacttcatgcaaataatcagactaagtatcataaaagtctagaacttatttcactgataaattggtcttattctgatttctcttttggtagaaaagggaaatgtgagacagaagaaaagtaggtttcagaagacaactatagtacacctgttgttaaattctacccctgaccattgtttttgagttttcattattttcttacaatttggactgaatcctgaattatttcctgccatagcaagtctgtaaagaagtgcctcagtgtaattatagtttttagttgacttctcaaaggaataggtttttatctctcattgttttatttcttccaataaaacaaaaattatgaaattttgaagactagagatgattaaaaaaatgacaactgttaaaaaattcagtgactgtggactattaaggaatgagtctccccagaactgagggacaaaaagtatctatttttttttttctttttttgagacggagtctcgctctgtcgcccaggctggagtgcagtggccctatctcagctcactgcaagctccgcctcccgggttcacaccattctcctgcctcagcctccctagtagctgggactacaggcgcctgccaccacgcccggctaatttttttgtatttttagtagagatggggtttcactgtgttagccaggatggtcttgatctcttgaccttgtgatctgcccacctcggcttcccaaagtgctgggattataggcgtgagccactgcgcctggcaaaagtatctattactctaatctcagcagagggcgatcatcaatgcttctatgggaagatttttaaccaacagagggacatgaaaaagaaaactagctcagaacaatccaagaattatgtgagatacacaaaatttatcaggcccagagaaacatgagtatgggactttagttatgccctctacacccatgcctggggacaattgtttaaaaacatttcattcctgactagttgcctcagccattatcttatgtttccagaatttgtgatacaaagaataatgtatagccaatcaatagcttgttgttttgatgtaaattcttagtaaacaacgtaggaactgccccttcttttcctttaaaaatccacttgtctaggccagtgtccaaaagagtttttctcaggttttcttctaggatttttatagtttcagattttacatttaggtctttaatccatctcgagttaatttttatgtattgtgagaggtgtgtgtcagtttcattcttctgcatgtggctatccaattttcccagcaccatttattgaatatacactgccacttccccagtgtatattgttattgactttgttaaagatcagttggttgtaggtgtgtggctttatgtctgggttctctattctgttctgttcacctatgtgtctacttttatattagtatcatcttgtttgggttactgtagccttgtaatataatttgaagtcaggtaatgtgatgcctccagctttgttctttttgcagagaattgctttggctattaggctctttttggttctatatgaattttagcaatgctttttctaattgtgtaaaaaatgacattggtaattttacagagattgcattgaatcttagattgctttgggcagtatggtcattttaatgatattgattcttccaatcatgagcatgggatttttttgtttgtttgtttgtgtcatctatgatttcttcagtattttatagttcttatagagatctttcaccttgttggttaaatatattcctaggcattttacttttttggtagctttgtaaattgccttcttgatttggtcctcagctagattattattggtgtataaaaatgctactgatttctgtatgttaattttatatcatgaaactttactgaattcattaatcaaatctgagagtttttttggtggagtttttagggttttctagatataggatcatactgtcagcgaacagagaaaatttgactttctttgtccaatttggatgtttctttttttcttttgcttgatttctctggtcaggactcctagaactatgttgaataagaatggtgaaaataggcatccttgtcttgttctaattcttagagggaatgctttcagctttttccattaagcataatgttggctgtgggtttgtcatacatggtgtttattatgttgaggtatgctccttctatgcctagtttgttgaggatttttatcatgaagaaatcctgaattttattgaatgctttttctgcatctgttgagatgatcatatggtttttacgcttaattctgtttatgttatgtgtcacgtttgttgatttgtgtatgttgaaccatccttgtatccctgggataaatcccagctgatcatagtgtgttatctttttgatgttctattgaattatatttgctaatattttgttgaggatttttgcattctcaaaagtaaaaacaacaaaaatagacaaatgagacttaattaaactaaaaccttctgcacagcataagaaataatcaacagagtaaacagtctacaaaatgggaaaaaatatttgcaaatgatgcatccaacaaaagcgaatatccagaattcacaaggaagtcaaacaacttaacaggaaaagaacaaataaccccattaaaaacaagcaaagaacataaacagacatttttcattaggagacatacaatcggccaacaaatacatgaaaaagtgcttaacatcaataaacatcagagaaatgcaaattaaaaccaaaatttgagccatcttacaccagtcagaatggctatcattaaaaagtctaaaaataacagatgttggtaaggatgtggagaaaacggaatgcttacacagtgttgatgggaatgtaaattagtataacgtttatggagaatgctgaaagattctccccggggcctgaaagcttgaagggatgagtaactcctcccttctcaggcccagtctcaaggtgcaaggctacttgcaccagcagcatatgccagcaagatagcagaagcaggaagagagctggccgcaagacacctactcttgctggaagacacatacccctgcagattgaaaaagaggccgtccaggtactacgtagcagtcgcgtcagactgggacactgcctgtttacaggagaccataaaacccctgctccatcctcatttggtgctgatgccattttaggccttagcccccctgcagccaggtgctcattaaaacaacacgttgctgggctgggtgcggtggctcacgcctgtaatcccagcattctgggaagccaaagcaggcggatcatgaggtcaggagattgagaccatcccggctaacatggtgaaaccccatctctactaaaaataccaaaaatagccaggcgtggtggcaagcgcctgtagtcccagctactcaggaggctgaggcaggagaatcacctgaatccgggaggcggaggttgcagtgagctgagatcgtgccactgcactccagcctgggagacagagtaagactccgtctcaaaaacaaacaaacaaacaaacaaacaaaaacatgttgctccacaccgcctcgtgttgtctgttggcgcgctctcggtgtttgaactgatacaagaaccttacatctggtgctgaaacctgggaggggctcaggtctgcgtcccctgtggacctacccctccatcctggagagcaggccacagcggcaagacaaaggaagctcctcagcctccagtcgccttttcgtgcatgcacataggtcactgatctcgcctactgataagtttcccaggaaccccattaacagggaaaaatccacatggcctctcttggtttctccggtccgaaaatccaatgttggtccaagaaggccccggcatgtaccaggcactcactagtcatttggtcttaggggaacacctctaagccattgatccctttccgggaacgaaaaagacagctgtgacagtcactccttttatcgtctccctccggcatccaggactgtctcctttaacctgttctcttgagcctaccctctgttacgggaaattcccagtcttccattctaaaggacggtcttctaggctgcctcataaaaacctgcaaaccttaggcctcaggcaagatatccaccctaagtgctttgtctgtttttgcaattcagtctggccacaatacgaattggataatgggtccaaatggctcacaaatggaacattcgactttacaattttaactgatttacgaaattattgccaacgaatggagaaatagggagaaattccttatgtccaggcctttttgcactcagatcacagcctgacctctgcaattcttgctcacctgttctaatcattcccctccattctcgctgccctgatcgcctttctcctcccaaccctacctctttatcctccttggatccagcagactgctgtccacccctcccagcccctacatctccctctcaactgtcttctttaaccccgcaagcttcctctttatcttctcagctgccatctttccagccgcggtcttctcagtcagcagtatccacctcttttcctacactgccctctcctcaggacaattctagtattgcctgtacccattttcctcccctattgccctctcctgaggcttgtaaacccttcccaccaccttacgcacctatctatcctccactgcctgttaattcaaccccttttcccccattcaaaccctcagcaggaaccacttctagcttcttccttctctcccactcatactctctcaggcgccatctttggtctatgccccacccttacttcagcgctggtgctagagtgccccctttaggaagtagcaggagctgaaggtattgttagagttcatgttcccttctccctcacttacctctcaaattaacagaagactcggtttattcccagaagaccctacctcttatattagggatttcaatactttacccagtcttatgaactaacctggcatgacctctacgttatactctcttccacccaaaacccggaagaccaggaccgtatctggactctagctcaggcgcatgctgatacaattcatcaccaagctcttgcccggactactggtgcagaggcggtccccaaccaggacccccactgggattatcaagacggggcctcaggatgctgcctcgagaccacatgattgtgtgtctccttgcaggactcaaaaagggtgcccataaagcagtaaactatgaaaaactttcagaaatcacccaaggtcctgacgaaaacccagccctttttctctctcatttaactgaagtcataagaaagtataccaacctagacccagccagcccagaaggaaccactatcctaaacctttggttcatctcccaatccacccccgatatccggcgcaagcttcagaggcttgacgacggccctcaaaccccacaacgagaccttcttaatttagccttcaaagtctttaacacttgtgatgaggaaagtaaaaggcaaaaacaggcagagtttcaaatgcttacctccgccatcaggggccctgcaggcccatggggcagcagctccccacagaagcctcctagcaatccaccttcacctgacgctggattcaagtgtggcaatgaaggccactggtccagacaatgcccaaacccaggtgatcccatcaggccatgccccctctgtggaggaccccactggaagtcagactgtgagtggcctcctcaaggactgcccccatcccttcctgagccagccaaaacctcctactcagatctcattggccttgctgctgaagactgatggtgccctggaacggatgccccagaaactaccatctcttcattcgagccaagggtaactctgatggtggtaggtaggccagtatgttttttcattaatacgggggcaaactactctactttacctaattttttaggacccacccagtcctcccaagtctctgttgtgggaattgatggacaagtctccaaaccccaagccacccctccacttttctgttcccttcacaccttttccttcactcactctttcttagtcctgccctcatgcccaactccactcctaggaagagacatcctttcaaaactccacactattctccacttccattttccccatagtaccctatgcatcaacccagacccctccggggcatctaactttcttctactcctccaacctcccaccttaaaacatgcaacttttccttatcccccatccgtagttaatcctgctgtttagaatacttccacaccctcagttgcagaacaccacacccccgtctgcattaaccttagagagcccacctagttcctatcacagaagcagtatcccatcccccaagctgctctcacagacctaaagcctatcatttttcacctccttgccagtcacctactctgcccaacaaactccccttttaacacaccagttctacctgttaaaaagccagatggaacttaattagtccaggacctcaggctcattaaccaagctgtattcccagtatgtcagtggttcctaacccatatactttcctttctgcaattccctccaataccacccatttttttgttctaaacctaaaggatgcttttttttcacaattcctttacacactgattcccaaaacctctttgcttttatgtgggaaaaccctgacacccacttttcacattagctcacctggtgcgtactacctcaaggtttcagagacagcccccacctttttggaaaggcccttgctcacaatctctgtatcttatccctagaactgtccactctccttcaatatgttgatgatctgcttctgtgtagcccctctcaaagagactgccacacccatactatctctcttttaaacttcttggcagaacaggggtattgggtatcccctaagaaagcacaaatattcactccctcagtcacctatctaggcctagctcttaccccgcaaacccgagggctcacaaccaaccacatatccctcctccagtccctcttgcctccgcaaactaaacaagaaattctctcttttctaggactagcaggatattttaagttctgggttccctcctttgctctacttgccaaaccattgtactaagctgctaaaggccctctccatgagcctttaaaacctgcacagcctattacccaacctttccatctactccaaaaggctctcatctcagcgcccatcctcactctcccagacctcaccaaacctttctccctctatacctacaaatggcatggagttgcactaggtgttctaacccagtctaagggttaattagtccaggacctcaggctcattaaccaagctgtattctcagcatgtcagtggttcctaacccatatactttcctttctgcaattccctccaataccacccatttttctgttctaaacctaaaggatgctttttttcacaattcctttacaccctgattcccaaaacctctttgcctttacgtgggaaaactctgacacccacctttcatgttagctcacctggtgcgtactacctcaaggtttcagagacagcccccaccctctgggttgttgcctactctctaaacagcttgaagccacagttcttggatggcctacctgcctctgagcattggtggcagccgctgtcctcacccttgaaagcctaaaactatctctccatgccaacctaacagtttattcaacccataacatcaacgacatgctagctcaccacagtgtactaagtctcatctctgccccacggctcctgcagctgtatgctctattcatagaaactccccacatcaccatgctaaccagctcctgtctaaacccagccatgctcttacctgaagctacaaccacccaagaccctacacacttctgtgtgaacactgttcaaatctttcttatgccttttccaaacctaaccttccagatatctcctttacttggtttgtatatggcagctccatccgacatcaaggatgctgacaggctggctatgctatagtgtcactccctcacactactgaagccaatctgctcctcctaggcaccacctcccaaaatgctgaactcactgccctcacttgtgctcttgctctagcagccagacaacagatcaacatatattcaaattctcattatgtgttccacatattgcactcacactcatccatctggaaagaacggggtttcctaactgcaaaaaacactcctgtcgtaaatggctctctcatcagcaagctccttcaaactgccaggctcccacagaaagttgccatcattcattgcacgggccaccaatccccagacaatcctatatcaactggaaatgcactagcagatcaggtagccaaacaagtagccctacaacccgtgcaaggccagtttctgtctctgtccttgttctctccactttacttctcagaagaaaaggaggacttccgagcccaaaaccttcaaaggcagggaccatggtatgtcaaggaagggtgcttcgttcttcttcactctcaaataatctctatcctccaaagcctccacaactctttccatgttggttacaaacctctcctgcaacttctctgcgctattctcacttgtgctcacctttccagccgtgttcgagaaattacccagttctgctctatctgccactcagtgtcaccccagggctccctctggctactgcctttttcctacccaccaagcctggggccaggtacccgggcaagattggcaagtagatttcactcacatgctgcccgataaacggctctgctatcttctagtctttgtctgtactttcttcgggtgggtagaagcgttcccagcaacttcagaaggtgcaaatgtcctcacacaaaccctcgtcatgtatataattccctgttttggactcccaacatccatccagtccaataacgggcccaccttcatcagccaaattacccaagacatctctacatccttaggaataaagtgggttctccgcacaccctacaggcctcaatcttcaggcaaagttgaaaaaaattaactctgtccttaaagcgcaactcaccaagctgactctagaaacccgccagtcatggacaaaacatctccttttcgccctcataagactctgcgcaacaccaaaagcaccctctttttatagtccctttaaaatcatgcatggctgaacttttgtcttagggcctccacccttaccagactctgagccactcgggaattacctcccctccttaatccagacatggtctttcgttcgtgaagcagcaaaagaggccgtgcctctccctgttgacacctccttgtcctctcaacataactgtcttgcaggcacagacatgtttatctgccaatccgaccctcaccaaaagctacaaccgaagtggacaggccctgacactgtgatactcagcatgccaactgcaatgagagtccaaggactccccacctggtagccccaaggctactacttcctccaaaacattaacagcaggcaacaccctcggagtccctgtatataataacctaaacaaagaaaaatgatccttaaaggtaggaggaagccaaagatggcaagaggatgaatggcctctgcaacagatcatcgaatattatggtcctgtcacttgggctgaggatggttcatggggttgtcacccttctatatatatgctaaatagaataattagactacaggctgttccagagataatcactaaccaaaccaccttagccctggaaatgctcacacaacaacaaaaccaaatgcgtgcagcagtttatcaaaacaggctagcactagactgcttattagcagaagagggtggggcctgtggcaagtttaatatctccaattgttgtcttaacatagacaataacggagaagcagtactagaaatcgcttcaaacatcagaaaagtagcccatataccagtccaaacctggaagggatgggacccaacaaaccttctaggatggtggttttttaatttaggagaatttaaaacgctggtagggacggtaatcttcatcattgggttcctcctgtttctcccctatattattccactaataataaaagccattaaaactcttgttgaaactacagttagctgccagacaatccagacgatgctcctgctacaatgacaccatggataccaacccatctctcaagaatatcccccaaaattaaggttttctttttccaaggtgccaccccctatgtcgggcctgaagtagttattgagaaagtcgccccttttcccttttttctataaccaaatagacaggaatggaagattctccccagggcctgaaagcttgaagggatgagtaactcctcccttctcaggcccagtcccaaggtgcaatgctacttgtgccagcagtgtgtgccagcaagatagcagaagcaggaagagagccggccggaagacacctaccctggccggaagacaagtatccctgaagatcgagaaagccggaagccacctaccctggccagaagacacgtatccctgaagattgagacagaggccgtctgggtactatgtagcagtcacgtcagactgggacatttcctgtttacaggagaccataaaatccgtgccctgtcctcatttggtgctgacgccattttaggcctcagcctgtctgcacccaggcgctcattaaaacagcatgttgctccacacccctcatgttttctgttggcgtgctctcggggtttgaaccagtacaagaaccttacaaacactatggagatttctctaataaatgaaaaacagtattaccaatcaattcagcaatctcactactgggtatatattcaaagagaaagaaatcattatatcaaaaacatacctgcattcatgtgtttatcacagcactattcacaatagcaaagatacagaatcaaccttggtgtctatcaatgaaggattgggtaaagaagatgtgatacgtatttataccatttatactactcagccatagaaaagaatgaaatcatatattttgcagctacatggagagaaatgcaggccattatcctaagtgaaataactcagaaagagaaagtcaaatacctcacgttcttacttataagtgggaactaaacaatgggtaggcatgcacatacagagtgaagtaatagacactggaaactacaaatagggtgagatgggagtgagagttgaaaaactacttattgggtacaatgttcactctttggtcaatgggtacactaaaagcccagacttcaccactatgcagtatatgcatgtaggaaagctgcacttgtactccctaaatatataaaaataaaaaataaaataaaatgtattagtaaacatcaatgaaaattttaaaatagaaaaacaaatacaaaataataacaatttacttgtaacttctgcttatcaggccacttgaatctttgcttcttggttgtaaatctcaaacatggcccaaataaattctaattttttaagtttgcttcagttttttcctttaggtcaacaggtagcaagcagctaaggataccactccaatgaaattagctctttatgagtataattagagcatgggaatgaggataacaacaaaagaaagcctaatgatgcaaaagagaggattattgataggagtgatttaatgattatatgttggagatgctggataggtgtgctggtcaagttacttagaaggctcatgctaattttcaggtatactaaaaccccaagtacatcctatggttgagtttttctaaatttttgctttgtgaatgtttatgcctttgtcaattttatacgctgaaattatgataaaaatcttaattttaatggaggtactgcagtgtatttgtataatcttttacatttatataaaataaactatatattcaaatacatatatacacacatacatacttatgtgggatttaaagtggtatgagattttaaaaatgcattgcacactggcaaatgtatatattaaattttggccctagttttacaaggtactgtatttttttcaataaatagccttaattaaatttaatctgccaatttgtatataggaaaattgtataatatattcatattaaacagaattagttgattatattaaataatcataaatgtagatagaaacatgtagatgcattgttatacgttaagtacttttccagaatgttcacatttactttacagttcacactgttgcagttatagttaatgaagtaataaaatgatatgtaaattgcttcaccttttcacctacttatatgggaaaaaaattgcttgagtaataacatttaggaaagatatctagaagcactgcaagtaacttgtacttgtatttgtgtttttccttatttgtctcttttatctcattcccatgtgagatgaatgaaaggatttccctgaaacgagcaggtatacaggagagcataaagggcttatgcaactaaatgcttcaccccttgacctttcattttcatcattaaagacttattcctttgggtctcaaagatttcaactacaagggaaacttattgaaatgcaaatattcctgggagaaataacatcttaaaatgtaatctgctgattttttaagcaattagttaactgcaggtgagagaagaagagaagcgaagaataggctttagaggtagaaggtgagaacaatggacaggagaaaagaatgttagaggcaccaaatgtaaaatatacccaaattttatttaaagtcaatcaactcatttaaaaagttttagatttttccttatatgtgaaaactgcagactacaaaggctagcatataattgtgtgtatgtccacaacctggtattctcattatgaaatacttgctattcaaacgaatagtaaaagggttttcttattatgaaaactttcagattctaaaagtgttaatttcttgagaatttttttggtaacctgtgtcttttatactctgtaccctggcttagaatttcttcagcctaaaatataactgaacatccagctttgaggacaaagcacaaaaaaggagagcttcagggaactgtaaagtgcagcagagatcatggagtagaaggagctcgggaaagaaacttcacaaatttgtttatgatcccctgagctcactcttgagaagtacatgggatgactggacctaaaaagcatgccaaaggctttgagaactgatctcatggagagagtattgttagtcccagacaggcaactgagtggtatttacacaggatagtttttaatagcattacaatgacgttaaaactgaactgatattaaaatcacagcacacgcttgaaggatctgaacataatcttgttaattgccaacccaaacgaaaatgccaacatttcccctacttaacaagatttaaacaagatgcaaggtcttaaacaaaatactgaaaatgtcagctgggcgcggtggctcatgcctgtaatcccagcaccttgggaggccgagacgggtggatcacgatgtcaggagatcaagaccatcctggctaacatggtgaaaccctgtctctactaaaaaatacaaaaaattagccaggcatggtggcgggtgcctgtagtcccagctactcgggaggctgaggcaggagaatggcgggaacccgggaggcagaacttgcagtgagccgagattgcgccactcactccagcctgggggacagagtgggactccatcttaaaaaaaaaaagaaaaaaaaaagaaaatgtctaagatagaatacaaagttagtgagcatttgaagaatcaggaatatcttagctcacaacaaaaaagactataaacagatgccaactctaacacaaaacagatattgaaattacttgacaaaagatgtaaaggacctattatcaaaatgttgcagcaaataatagtgagcactcttgaaataagtggataggtagaaagtctcaacagataaatagaagatataaagaaaaactcaatgaaaaatttagatctaaaatataactgaaaattaaaagctcaacagcagaatggaaataacagtggggctagtgaatttgaagatagattaataaatattacctatatttctaagtaattcaaggtcaaaaagtctcaagaaaaaaatttggactaagtgaaaatgaaaatacgatatattaaaacttgttggatgcagccaaatcagtgtttagggggaaatttatagcattcagtacttaatcctaaaacaaaatctcaaatcagtagtatagatttccacattaagaaactggaaagaagacaaacaacaacaacaaaataaaaccaatttagcaaaaggaagcagataataaagaatagaaatacaatttaaatcagtaaaaatatagaaagtaaaaatatagtcattggaaagtcaataaaattgatacaacttcatcaaaactgcagaataataaaaaaggagaagatacaaatgacaacatcagaaataaaagaggtcaatggccagttgcagtggctcacacctgtaatcccagcactttgggaggccaaggctggaggaccccttgatcccaggagtttgagaccacccccagcaatatcatgagacccagtctccacaaaaaaaaaaaaaaaaaaaaaaagggccgggtgtggtggctcactcctgtaatcccagcactttgggaggctgaggcaggaggatcacaaggtcaggcgatggagatcatcctggctaacatggtgaaaccccgtctctactaaaaatacaaaaatttagccgggcgtggtggcggacgcctgtagtcccagctactccggaggctgaggcaggagaatggtatgaacccgagaggcggagcttgccgtgagcccagatcgcgccactgcactctagcttggacagaaagagactttgtctcaaaaaaaaataataataaaataaaattatctgggcatgatgatgcacgactgtagtcccagctgcttaggagactgaggtgggaggatcacttgagcccaagaggttaaggctgcagtgagccatgattgcaccactgcattctagcctgggaaacagagtgagaccccatctcaaaaagaaaacaaacaaacaaacatacaaacaaaaagcgaaaaagaaaagaagtaaaagagggaatatcaccacctacccccagcacattaaagaatattgagggaatattccaaacaacttatgcatataaatttgcatgaaatggactaattcttcacaagtcaaaacctgctaacatcatccaaggtgaaacagacagtacaaaaggtactgtaattactacaacaattgaattaatgattaaaaacctttcaaaaaagaaaactccaggccaaatcgagaccatcctggctaacacagtgaaacgccgtctctactaaaaatagaaaaaattagccaggcgggtggcgggcgctggctcgggaggctgagccgggagaatggcgcgaacccggggggcggagcttgcagtgagccttgattgcaccactgcactccagcctgggtgacagagccagactccatcaagaagaaagaaagagagagagagagagagggagggagggagggagggagagagagagagagaccaatacagtgagtcacacacaagtttgaaatttatttctctcttacttgcctgcagaacatgtaagcattttctctccatgtcatccagggacccaggttctctttttcttcttgttctatgattctctaggattttggaatggccattttctgctggtaaggttttggagaataaggatttgctttaggacttatttaaaggtaaacaaacaaacaaacaaaacaaaacaccacacacacacacacacacaggttttggtaggccaggctgtgctgcttttgaaagtgcaatcgcttcagaacctctttgcttctagtaaatttcatattagtgccccaaaccaaagattcaatctagacagatttttaagcctttcaactcacatttattaaatgaactccacaaaatcagctcagctcatttccctgtctcattttaaatgcagctactggatcacacacacacacacacacacacacacacacacacacacacacacacgaattaaaaaaaaaaaaaccttaaataagaaggcaatagtcttaatctgatttttgaaactgtgctacctcgaactgtttggtttaaagtgacaattgtctcctgttaaggcagttggcttttccaacccaataaggcctcaagctattagactctgagtcaattagacaacagactcaggcagagaaagccttccttggcacaactgttatctcttctatctctgctagtcagctagctaatgcctgcctgacttcaaccctctccactacaacggtcaaggtacctctgggtggttattaattaagcatatgtttaattaatgttcttgtcaaacatgctgtaccccatacaagtgaatagggctggaaagttgacttttggctttttcgtttcctttgctctgactgcttaacattctgctcaatcatcaactacccctacactgaaaattcagaatataatgttataattctatccctttttctataccctcctcaatttgttttttaaccaagcttttcaccattttctctctttttaaaaatttccctcatgtgttctctaagaaagattttgtgatcctaaggcttgtgagctcacaattagaattaagattaaccttgctgtttttggatcatgatatactcttctcagccattagccctgaacctcttagtgttaaactctgatgactctaatgttgcatatacttaaaatatgtttagctctggagaggtcttctagagctccccataagctatcactaggcttaagagggagattcatttcataaggaatgatgctgcctacaatttaggaggccctgataaatatctgctgactacataatgggagctacatatgtatttatgagattgattaactattattttattttcctgactttaatgagggcttgttggtacaaggcctcattctatcaataagtagtttaaatgctttgacgtatttaaccttcaaaacaatcaaacaaactaggtgttatcattttccccattttcctaatgaagcggagagagattaagtaattaacctcaggtcacaagtggcagagctgggattcaatccaacaatctggctccagagtccgtacagttaaccatgacattcacccaaataactctacaaacacaaaatctatattctttaagaaaaaaaaaaagacaattctgttataatatattttccagagtattctaccatatcaggcaaataattcaacatttattctatagtgtggcatttgttaaataactagtctcacaacagactattaaatgtatgcatttgtattgagggaaaattaaagaactgatttgtgtagggaatttttattccttttggaaaatcctttgttaaaagatctctaagtgattaattttttaaatttgcataacacagattcacaaaataaattgggttaattttcaggtgtgaaaaccctctgggaattggtggtttttcttgatgtagcaaatatcttgatcacagagactaacatttcaaataacatccctgctttcacaatcatggggccttattttataaagccaataggatgtaattacattagaggtgttatttttaaaaataccaacaaaattaatttatgcttcagagggctatggggaatttcacatttgtgtgtagccacacacagaactttaaacagtaatatgaaaccattctaaaagttggatagtaccaaaaccttacaaaatgataataagaactagttttgtcacatattttaagcaaccaacaaagaaagcattccacctttgtctttgtaatccagcctttacagctttttactagatactgtataagcccttatggaatgaattttaaatcctgcattagttttttattgctgtggtaacaaattaccacacatttggtggcttaaaacaacacaaacttattatcttagagatttaggggtcaaagtttaaaatcagactgacttgggcaggactggttggcaggtctggttttttccagaggttttagggagaattcgttctttgcttcttccagcttctgcaggctaccagcattctttgattcatggctacatcattccaccctctgcttccatcattgacttttcttacttggagcctcttgcctccctgctatgtggacccttttgattatgctgagcacactaagataatccagaataacctcctcatctcaagatccttaatttaatcacatcaacaaaatttattcagccatataaagtaagatattcacacactctagagattagagtgttgacacctttgccagatcattattttgtctaccacaaaaaatgctaacctattttttgtattttattatatgctaccctcattttatctaatccttcattttcacctgttgaatagtactactgtcagtaacataaaaacaacatttttgaaatataaattaattagttaaagcagtccatctatttgtgcatcattattatggtctggtaagtttactgggtgtcgtccactttactgtcttgtcatccttgaaactattttctacagccaagagttggattaattgactctataattttaaaaatagtataaaacacttacctttaattgttttgcattcatctctttcactctctctttttttgttttaggatatggagtctccctctgtcctccaggctggagtgcagttttgcagtcataactcactgcagccttgaactcctggtcttaagagctccccttgcctgaggcctcctcagtagcagggactacaggaattagccactgtgcccacctaattaaattttttaattttatgattattagtattagtattagtgtttttgtagagatagggtctctctatgttgctcaggctgttctcaaactcctggactctagacattcccctgtctcagcctccaaagtagctgggattataggtgcgggcactgccccggctcatctcttcttttctagagaccttatgtttatatatttagttaattttaacaagacttcttagttaatattttgattttaagtgcatataagaaagcaatgtctttaaaagctgccagagagaaagtataacatagacttcagagctaaataaaaagtaggttttaaaagatgtcaataaatacatttccaaatgacagaatggtttgaggctgtgggatgataacaaatccgggttgaataacaaatggcagagacgttgtgtgatgctcatatcaggggtgagtgtgactctaggttcatgtcatttatatgtccattaatgaaattttaagacctttttaaattcccacgaaactacaaagaaaaagaacaagtagttttgttattttacagtggatcatcctatggtaacaattaatgcttcataaagagacactgtggtacagatgaggagcaggatcttgtttattgccttgtcaaggaacaaatctttacaaaaataaaggaattggctgttcttacaatcttcggctgctgtaggtattttgatttgttttgggaggtggtgatggtgtgaattttaagagatctttctgagaagaataaaaggatgtgactataattaccaagcgagtggaagaaaaaggatacctggtaaattagtgagcctttgaacactactttctatccactgggctgagaaatgaacagtttggaaagaggctgggaaaatgcaagattttagttcagcaaatgttgagatcagaaataattggataatgcatgaaattatgaactgtttacctgacgtttaagcatatggtaatacacactgtgagtgaagagtctggattttgatgaaattaataactttttggtgttctgccatctgttttctcattatacctgaaaaaaatcactctaaaaagcatttactgagtgtttatcatgtgtcagacactgtgccagtgcctaagtcaactaaaataataacctgcttttctggggtttataatcaattagaaaaagacaggtgtatacatgaataactgctgtttcaggttaaaatgggttgaaattccaccctagaatttttccccttcccctgcacctcacaatatggaacatgtaaactgcaacaacaacaacaaaaataatcaacagaaaccaaataaggaaattagcataaactagtgcaataactgaaaactggccctgattaaagaaaacgagattctggagtgcaacaggaaggcttaataaagccttaaataatatagataaaacaacgaaatgctatattgtggattttcactaatacccccaaagttggggaaaagcaaataagtggatatctgcatctttttattcttcttaccagaaagcaataaaaacaatagttggaaagaaataagtgaaattgagagactgggcttgactggatatttcttaagaaaatgaaggctccacagctgcatacccagttggaggaataatccaaagtacaggataccctctgacctgagtagatggagtgaattctagtatagtatatttaacaaaatctgagagaagataaagtccaagcattccaaccaagagtacaaagctacctcaactgatctttattctcttctccccttgggctgcaaaattgtagatggaacaagacccatccagtacagaaggctacctagttgataccaacatacaacagattgagaattactagtctaaggaaaagaaaatgtaactgcccaccccccaccaccaaacccgaccaaacccaaccacagccaaagtattaatctcacaaatgagaaaactcagggaaatttatccattcctgaatcaaaagaaagatgatagagaggtaaaaattttgaaaatcttctgtgcacccattaacatacagaactactgctgggagaggccacaaaattactgacctgtgagcttccaaaagataatggttatgaaagacgaagactaagaatctgttaacgtttaaaggagaataaaatgacataacaactgaattaaatgaagaatcctagattgtcctggaacagaaaaagacattggtgagataattgatgaaatctgaatgaagtcttaactattgcatcaatgttaattttctctttttgataattgcactgtgcttatataagaagatatctctgcttttcagatgtatacactgaaaaatttagaagtaaagagagcttatgtttgcatgagggcttactctcatttatttctgaaaaaaactagagcgataaaatgataaaaaaagtatagtaaaatgtaacatttgaagaatctagataatagggtaaattggaattccttgtgcttctttgtagctctgaaattatatcaaaataaaagttaaaagagaaaagtaaatattaaaacttggacaatattaaattaataatataataaaaaaataggtaggccaagtgtggtggcttacaccttgatcccagcactttgagaggctgtggtgagaggatgacttgaggccaggagtttgagaccagcctaggcaacatagtgagaccccatccctacaaaaaataagaaaagaaaggtagagtggaaaaatagattgaagtataaagatattaaggtcttcatattgcatagcaggaagataaagccatttaaaatttaaatgtacttgtgaaagaaccagtctgagtccagtgtcttaatgctttttgtaaacttgttttgtaaatgtagaagtcttttaaatgagaatattcttatcttgagaaacaacttactggaagttaagtagttccttcaggtgttctttagtttctttttttccattaaaatcacataaataatatgtataatatgatcccattttaataaaatgtcagcctacttagcctcctcatcctatctagatatatactttgtatgatagggttcatttccatgtaataacattttaaatttttaaaaacattcatctccatgattttcagcactatttgaaatatttacaataagcagaatttatttttacacaaaagcaattttctttaaaaatattaaaaacaaaaagattaaaacaaataaattaaaaattcaaatgtgataaattgtgggtgaaaggaatatagatgcttgttatttgcttctttatattattctgtgttgttaaaatttatcatattttaaacaaactagttattaacaaatacataatacaatacggttttacagacattgccttggaagggtgtctagtgtctagtacagtgggataaggtactgtacaattcttttttttttctccttcataggttattggagaacaataacctatgttattgtttggttatgtgttatgttatgtgtttggttacatgactaagctctttagtggtgatgtgtgagattttggtgtacccatcaacggaacagtattcactgcaccctattgttagtttttttatggctcaccccctttctttcgtttccccctgagtccccgaagtccattgtgtcattcttatgcctttgcatcctcatagcttagctcccacttatgagtgagaatatacaatgtttggttttctattcctgagtttcttcacttagaataataatctctaatctcatatccaggttactgtgaatgccattaatttattcctttttatggctgagtagtattccatcatatatatatgtgtatatatatatatataatatatatatatatatatatatacatgatgtagtgtgtgtgtttgtgtgtgtgtgtgtatatatatatatgctacaatttctttatccacttgttgattgatgagcatttgggttggttccacgtgtgtaattatgaattgtactgctataaacatgcatgcaagtatctttttcatataatgacttcttttcctctgggtagatacccagtagtgggattgctggatcaaatggtaattctggttttagttctttaaggaatctctaccacttccacagtggttgtactagtttatgttcattcccaccagcagtgtagaagtgtttcctgttcactgcatccacaccaacatctactattttttgattatggccattctaccaggcgtaagctagtatcgcattgtggttttgatttgcatttccctgatcattagtgatgttgagcattttttcatatgtttgttggccatttgtatatcttcttttgagaattgtctattcatgaccttagcccgctttttgatgggactgtttgttttttacttgttgatttgtttgagttaattgtagattctggatattagtccttttgtcgtatgtatagattgtgaagatttgtttccactctgtgggttgcctgtttactctgctgactgttccttttgccgtgtaaaagctccttagtttaattaagtcccaacaatttatcctcatttttaaggcatttgcttttgggttcttggtcatgaaatcctttcttaagtcagtgtctagaagggtttttccaatgttgccttctagaatttttatagtttcatgtcttagatttaagtccttaatccatcttgagttaatttttatataaggtgatagatgaggatccagtttcattcttctacatgtggctagccaattattccagcaccatttgttgaataggatgtcctttccccattttaagttttcatttgctttgtgaaagatcagttggatataagtatttgggtttatttctgggttgtctattctgttccattggtctatgtgcctatttttataccattaccatgctgttttggtgactatggccttacagtatagtttgaaatcaggtaatgtgatgcctccagatttgctcttcttggttagtcttgctttttttttttttttttcctccatatgaattttagaattctttttttctaattctgtgaagaatgatattggtattttgatgagaattgcattgaatttgtagattgcttttggcagtgtggtcattttcacaatattgactctatccatccatgagcatgggatgtatttccatttgtttgtgtcatctatgatttctttcagtagtgtttggtggttttccttgtagagatctttcacctccttggttatgtatattcctaagtattttattttatttttttgcagctattgtaaaaggggttgagttttttatttgattctcagttcggttgctgttggcatatagaagggctactgatttgtgtacattaattccgtatctggaaactttgatgaattcttttatcagttctaggagctttctggaagagtctttagggttttctaggtaaatgatcatatcatcagcaaacagtgacagtttgacttcctctttaccgatttgtatgctctttctttctcttgtctgattgctctggctaggacttccagtactatgttgaagaggagtggtgacagtgggcatccttgtcttgttccagttctgagagggaatgctttcaacttttccccatttagtattatattggctgtgggtttgtcatagatggcttttattatattgagatatgttctttcaatgtgagttttgctgagagttttaatcataaagggatgctgggttttgtcaaatgctttatctgcatctattgagatgatcatgtgatttttgtttttaattctgtttatgtggtgtatcacatttattcacttgcatatttaaaccatccctgcatcctgtgtaatgaaacccacttgatcatactgaattatctttttgtatgttgttggatttggttagctagtattttgttagggattttagcaactatgttcatcagggatattggtctgtagttttcttttttgattatgtcctttcctggtttgggtattagggtgatactggcttcatagaatgatttagggagggttccctctttctccatgttgtggaatagtgccaataggattggtaccaattcttctttgactgtctggtagcattctgctgtgaatccatttggtcctgaactttttgttataggtaattttttaattaccatacaacctcgctgattgttattggtctgttcagggtatctaattcttcctgatttaagctaggagggttgtagctttccaggaatttattcatctcttctagattttctagtttatgagtgtaaaggtattcatcgtagccttgaatgatcttttgtatttctgtggtatcagttgtaatatctcctgtttcatttcttattgagcttatttggattttctctcttttcttggttaatcttgctaatggtctgtcagttgtatttatcttttcaaagaaccagctttttgtttttattcatcttttgtatttttttttcactttcatttagttattctctaatcttggttatttcctttcttctgctgggtttgggttttgtttgttcttgtttctctagttccttgaggtgtgatcttagattgtttgtgctctctcaggctttttgataatgtaggccttttgggctatgaactttcctcttagcactgcctttgctgtatcccagaggtatttgataggttgtgttgcttattgccattcagttcaaagaattttttaatttccatcttgatttcatttttgacccagtgatcattcatgagcaggttatttaatttccatgtatttacatggttttgaaggttccttttggaattgatttccagttttattccactgtggtctgagagagtgcttgatgttatgccaattttcttaaatttgttgagtttcattctgtggcctatcatatggtctatcttgcagaaagttccatttgctgttgaatagaatgtatattctgtggttgttggatggaatgttctgtatatatctggtaactccatttgttcctgggcacagtttaaattcattgtttgtttgttgacttttctgtcttgataacttgtctagtgctgtcagtggaatattaaagtcccccactattattgtgttgctgtctatctcatttcttaggtctattagtaattgttttatacatttggggactccagtgttaggcatatatatatttaggattgtgatattttcctgttggacaaggccttttatcattatataatgtccctctttattattttttttttactgctattgctttaaagcttgttttgtctgatataaaaatagctactcctgctcacttttggtgtccatttgcctgaaatatcttttccacccctttaccttaagtttgtgtgagtccttatgttttagttgagtctctcgaatgcagcagatggttggtgatttcttatccattttgcaattctgtgtattataattgtagcatttaggccatttacattcaatgttagaattgacatttgaggtgccattcaattcatcctactatttgttgcctgtataccttggttttttgtttttgttttttaaattgtatttttgttttatacatcctgtgacatttatgcttcaaagaggttctgttttgatgtatttccaggatttgtttcaagatctggagctccttttagcggttcttgtagtggtggcttcgtagtggcagtttctctcagcatttgcttgtctgaaaaagactatcttttctttatatatgaagcttagtttcactggatacaaaattcttgattgataattgttttgtttgaggaggctgaagataggaccccagtcccttctagcttgtagggtttctgctgagaaatctgctgttaatctaataggttttcttttacaggttacctggtgcttttgtcccacagttcttaagattctttcctttgtcttaactttagataacctggtgacagtgtgctaaggcgatgatctttttgcgatgaatttccaaggtgttctttatgcttcttgtatttggatgtctagatctctagcaaggccagggaagttttcctctattattcccccaaatgtgttttccaaacttatagatttctcttctttctcagtaataccaaacatttttaggtttggtcatttaacatagtcccagaattcttggaggctttattcatattttcttattctttttttctttgtctttgttggactgggttactttgaagactttgtcttcaaactctgaatttctttcttccatttgtttaattctattgctgagactttccagagcattttgcatttctataagtgtgtccattgtttcctgaaattttgattgttttttatttatgctatctatttgcttgaatagttctccctttacttgttgtaccattttttggattttcttacattgggctttgcctttctttggtgcctctgtgattagcttaataactaacctcctgaattctttttcaggtaaatcagggatttcttcttggtttgggttcattgctggtgagctagtgtgattttttggaggtgctagataacattgttttgtcatattaccagagttggctttctggttccttctcatttgggtaggctctgtcagagggaaggtctagggctgcaggctgttgttcatattcttttgtccaatgggatgttcccttgatgttgtactctccccattttcctatggttgtggcttcctgagagccgagctgtagtaattgctatctctatactggatctagccacccagcaagtctacccagctctgggctggtactggaggttgtctgcatagagtcctgtgatgtgaactgtctgtgggtctctcagccatggataccagcacctgttctggtggaggtggcaggggggtgaaatgaacactgtgagggttcttagctttcatggtttaatgcactatttttgtgttggttggcctcctgccgggaggtggcactttccagagaacatcagctgtggtactgtggggaggagcaggcagtgggcagggccctagaactcccaagagtatctgccctttgtcttcagttaccaggctgggtagggaaagactactggatgagggcagggctaggcatggctaagctcagactctccttgggtgggtcttactgaggctgttgtgggagatgggggtgaggttcccaggtcaatagagttaagttcctaggaagattatgactgtctctactgtgtcatgcaggttgtcagggaagtaggggaaagctggaagtcacaggcctcacccagctcccatgcaatcttgagggccagttcactcccaccatgccacctccaacagcaccaagtctgtttccaggcagtgggcgagtagggctgagaacttgcctcaggccacccgcctcccagctgcaaaagcaaatatggctttccttcttccccgacctgtggaatctgcacactggattcacgccctcccccaagttctggccaggaggcttctcagtcggttcaaattgttacaatgttcacatggaaatttcctttgtcctgtggccttttctcagaccctctggccgtcctcttgaaggactcctatgaggccaggcaaaacccacttgatggggaacacagcaagctcccaggacttttcctgctgcttcctctacccctgtatttctctcagctctctaaatggactcagctccaggtaaggtcaaaatcttctccagtaatctaggccttcagtttccccagtgggggtgtgtgttcggcaatggatgatttccctttcccacttccacagtatgggtactcacagtatttggggtgtctcctgggtcctgcagtagcaatagccttccttcagggggtctgtgagccttctcaggtttcctgatttattcctgcagttgctctggagcaaacattcaagacgtaagcctccacacactgctctgtccacccgagtcggagatgcaatttagtcctgcatcccgtccgccatgatccctgaaacctcagcactgcacaattctaattgaagggccaggaagcacttccaatagatggtgatctcttagctaagccttgcaacatgagaggtgatgggtggatggaggtaagagggcatggagaatgaagaaagaaccctatgagtgaaaggcattctcttgaagtaacctcatgtgcaagcagtgggctggttcacagaccgttggggtggaagaatgtgtaaaagtggaggcggggtaaattggtggctgggagggtggtacaaagtaagtgatcaaaatagaaaattagaaacaggactctggagggcttggtatgccatatgaaaaggtacagacattgttccatgagctaatgtgtttatgatcaggattttctagaagaaaactgcagctggagaggcctccaggagatcagtggagatgaggacagtcagaggggtaagcagggctccaatgctttatccagcttcaacatgagtaactccaaacttatctgtgtggcatattgaagttatattttaagaatggttttagatcaacatgctccagaatccatacctccatgacctctaagctcttgggataattgagacagacagtatttggtttgcggtttcctagaatatattatagaacagattatactccctgtgctatgttgtcacagggctaaatctgacatgaagagagttttttacaaacagtttgaaagtgttacactataacattattttatgtcaattccattttcctcttaccacactttttcaatcacttgcatcaaaataaagggagagatattacttaggtggtggacagaatcttatgagagtatggtagtgggaatattctgctgattcagccacctttgctttttgtcctgagagatttgatattccaaatatgttgttttcaaactcctcattgtcccctggtaatttttagaaataacttaaatatgtgtaccagaaatatgaatatatgtcctcatctttccttaattagtatgggaggaaaggaacaaaggaagaaattgattattgttgttatcggccattccaagctattcagactttggtagcatggaagaagagtagcagatttgacatttgctgtctgattttttatcaagtctactttagaattagatgctgaaagattattaatattttaatagtttcctgacaccttctttcccttttcacttaatatgtgaacaccacattttatgactatgaaaagccaaagaaggactttcagtagagaagaaacaggaccagatttgtgttttcgaatcattgttctggcagaattgaggaaggtttctatgttttacaggaatgatactaaaggcacaaaacacattgcaccaagataatgaaagcctgaaatggaaaagcctcttcagaaacatttgccaaataaatgaacgaataggtgggcaaatgaaagcttgaattgagacaatgggaaaggaatgtattcagatgcaaggctgcaaggtatagcaaagaggcaggctacgggggcacacagactagatagcgaaagaaagacgtgggagggatcagggtaacccctgggtttctggccagggccacgggacattataattttatatatacatttaagataggtaaatagaggaggaagggaaagaaagatgataaattctgttcttgctaagttgcttttgagacctggggcctggggtatccaggtagtggtgtttagtagactctggagagagaattgaaagagccatctggactgaaaagaaatatctaggacttacaacaatggaaggggtaattgaagtcaattatagagaaagaaatcgcccagggataatgcatagtgagaagaggagaaaagaatgccacagaacaccaattttaaggagaaatcagaggatgaggagtcaacagagactgagcagaggggcagcatattctactccacccttatcactgtgtttacttgtgtatgcatctgtcttccttttgagactatgtcctttaaaggggaaagcatttcgtattttattccaaaaatctaaaatagtagatgataaaataaatttttgctacataagttaatacgtatcttttcagtataagacgtattttgataactttatacaagttcttttcctctgtaattggtggatgtacatgtttataacttagtaaagttatccaattttgtgcagcactgcagtaattatagttattacccttaaataattatggccagagaaatactagcctaacatggttgaattttaggaacattggctcaaacagtatgtgcagatatcttgagacaccatgcatgcaataccaaataatctcacagttttttttttctgcttttataaatcaccaggaagccaagacatctcagcaacagcaacctgactatagatgtaaaatactcctgcagagaataggagaagtatatgcttttcttctgtaaagttatttaacattctgcaccactcttatacactaatttgcagttgaagtaatagcatttctacataggtattttgcattaatgcaaatgtagattctaatattcaggaaaataattttatactgttaatattatttctagctataagctattctgactgacaccagctgcctattggggtgatttcgggagcattcaaagagccctctgccctctcaaatatagttctcccctgttctctgactcttctgattttcctatcctgtaagatgttattagatttaaggagtacactctaaacacccattataaagagggcttagaagcttaatttttaaataacaggttatgtgcaaatgtgaaatctggaaaatagaacaatcttacatttgagtactgtttgtagtgaaaattattagctcttataattaatcctttttaattatacaggaaaatatatttatttgatcaattgttatagccttttgcaattaattctctagatcacccaaagagcaggttctgaccattgacttgcaagttctttgagggtagaaactgcatcttgatcgcctttatttcctgtccttgtcactgtcagttaaaagggacttgcatagagaggagaaagagggaggtagatacacatatcactgccctgaagggtatgatctagagtaggaaatgggtaaagacaaaggaaggaaggagaatccaaaactaatgaactgtaaaaatatttgattgtatgaaacaagatgatgatggaaaaaaatagaataggaaggtttcctccctttgagagactgtttccaagattcttcaccaggaaggaggctttgtcatagccatgatgtttgctccacaagacatagagagcagcagacaaagaaggtggaagctccagggaaccctataactgatgtgtgctgttttgagaacaaaataccttctctttggagttctggctttagaggaaattgatagaactaaaagtacatttgacatgttcattactcagggaaattaatccattatggcaattagtgcactctttttgcacactgaggtctaaataccaactgaaagaagttataaagatgtgatgttaatgagtgttgtgaggttgtcttttctcaaagaaaactgagtacatgaatttaataaaaatattcagctccctcaaaagtagaaagaatgtctgaacaagaccaggcttttatcccatcgaaaaaggatcacatacaaccaagtttcactaaaccttttaaaatggctatcatttttaatgcagcagacgtggatagcagaacagtatacttttgaaatgaggattaagtcatctcaataaattgtaaaccaaatatataaagtaatgtttcaaatacataaattagaatttcattatataaagtagcattttatttacagaaaaattttaaaaacattaaaatgtaaatgtgatcttacatgtcaaggtatataaactgtaaagtaatacacattgcaatatttatcttcctaaagttttacataccatgtacctacagtgggtcaccagtcggtggcaatacatttctttactatgtccagaaatgagttgagggggtagatgataacattacatataaatatacattacatatatacatgtatgcaatggagataaaaaagactttactaattcaactttttataggcaaaatattagaatagagttatgtaaattatacatttacatattgtaagcaaatagcaaatagagcattctctcctagcataaggttatgcttaaaacattaacatttaaattgcatgaattttaataatgtctccgaacaatgtgttttctggcatttattcagaaactgagtaatacacactaaaacttgttctggtctaaagctttttgaggactctcttgccctgtgtactgatggcttctgaagtccatctgataaaggaccgaataatatgctaaagtcaaacactgaatattagcccactgtaatttcttaattttttaaattgagtataatacacatagaggaaggtgcacatataaatgcagggcttagtgaatttttgcaaatttaataaacccattcacagatcaaattgtacacagatcaaattgtacacagatcaaacaatagaaaatcaccagcaccataaaaatcccattcttgcctccagtcactatgtcccaactccaaagggtaacccctatcctgacttctaacgacatggtttagcttttcttggttttgcttttcctttttatatatcttatagaactagaattccacaatgtatgtattcttttgtgtttgttttttttttacttaacatgatgggagtgagagtcatccataatattacatttaattgtaggccattcatccttattgttaaattcttttgtgtgaacatatcatactttatctgtcaactattgatgatcttttgtgtaatttccagtttgaagctgttttgaatagtgctgctatgaacattctaggacacatcttttggtgaatatgagtatgcatttgtttgttctatacctcagagtgaaattgctgggtcataggatataccttcagctttagtataacaaatactgccaaaccgctttccaaagtggttgtgctccaccctaattaaaatatatatatatgtatttatttaagagactgggttctcactatgttgcccaggctgttctcaaacccctgagctcaaatggtcctcctgtcttatcctccctaaagaatgggattacaggtatgagccacgactcctggctccaccttcattttttttttttttttctttgagacggagtctcggtctgtcgtccaggttggagtgcagtggtgcgatctcggctcactacaagctccgcctcccgggttcacgccattctcctgcctcggcctcccaaagtgttgggattacaggcgtgagccaccgcgcccggcccaccttcatttttaaccaacctccaggttattattattccaggaggtttgttacctacatgggcttttctgatttaccatatatctgctcaaacctgaaatcataggcaaattctcaattgtttcagacctatttctttgcaaccaattatttcagaccaaaccatagtcctacagaaaaaagaaattatgcaatctagtttatgtagccccaaataaataattgttgcctcctaattttggtgttgtttcttgtccaaaacaattggaatgggaatctagggaaatgactgttgcagctgccactactcttagtgtatattacattttctcagtactttcacaagaatttcaggtattattatcctcatttgaagtgtgaggaaactgtctcagaggggttaagtgactgcccagagtagaatagctagtgaggggtggtgcagggatccaaactacgtcttttctgagtccaaagcctggcatctttcactctgctgagcacctcacacagcaccgtgccacctagtgactttttcatgctgtgtggcttaactggtctctctgatacctagagggagctcactgtgattcagtttagccatgttaatttagtgtcgttggtttctgattgttttccattgactttcataatgaaaacattcagtataaaatataatttgaaatgttacacaatcttctctccatatcaattcatgcatagggatatggtactgtagatgaagacacagaaacagtgctgttcgatttattctttgtgttttttgtaatggtcataattttgatttaaatattacaagtacaaatgctaattctgtgtctttgacacctcttcctctactttgaagatatgagcaaaggcagctgctattcgtgaccatgcactgaagctgcatattggttgacaactggagacattagtcacaaaaacctttcagattgccattctatttcttccctcatagtttcagcattttaatcagaatgtaccattttactcatactggccatattccaagtggcctgtatgttttaaatgtttctactgtacattggttccacttcatctcatcatacagctactgtccaaatgtccattgtctgcacacatcaaacctagtggagtttgttgaagcaaataacatgagtagtctccaatgtcaatactctggcttcattccatgacctctcagttggtgatcctctcttgctatttagtgctaattatgtctttaaatgatgttggtgagttgttcaaagaattagatgtgattaatatgaaaggttcaaatctctcatggacgtagagtacatcacacagtatcttcattctacatacctttactttggtctgaaatagttgctttcactttttcatctttatcataattaagaaattatgctgaatggccacatttgtgccaagaatgaattgaattaattcactgtgctgtcaacccccctaaagaacaaatctttgcccttgaaaaggtatctattgagcaccatagtgttctgtccttggccctatgcaagtcactattgtcagcaatgtttagataaaaggattgcttattaaattttcatgatactgggaagtgtagtaaattttagtgtttcagaattaagacttaaaattattccaggagactagaatacttcaccaaagcacatggaataatatttaaaacagaatcaaggagagtaatgaatttaaacataaaggattaattttacctgtagaagatatgaacaactgccctgaaagaaattcctataaaactttggaggatttagttttcttggtgttaagtatcagttaacaatatgatacaagtataattcctctgaattttatttactgttatcaagatttaccatgtatctggtattataataggcaattttgcatgtcatctgcagaagataaataaaaacatttcgggtggtaaatccttaaactttgtttaaaactctgagcataacacagaagcaattaattgaaggttttttttatttagagaggtaaataaatgtatcctagggacatttctttctgagcatctaaattaatataagaataaaataaagaaatatgtgttcttaatattttcattgactacaccctcttaaatttaatttgttgcagccatacttttagcagccttaatttacgttagcattttctgacatctaatttgccaatggtttatattattgaagaaatattcctattttatacttaattactaggttgctacaggtacgttcagggtaagtctttcctcaaaaaagttttttttgttgctgctgttgtttttttttaatacacaagctgtttgccaactgtgtgatcaaaactccagggttatatgctgaaaagaataaaagagatgattctaaccaagaaatgttgttaatggttatttctcattggctccttcatctttaaaagaagcatcataacttaaagtgaagtataactgctcctgatgaatgtgagcatgagattgcatcaaaatatactccctaagataggtataaataaattttccatggcaaactgaagagactcattcaaatgtagctgagactactctcaatgaggaaaattgtagaagtgattttaatcctgggtctcagattatacatggtgagtctcagggaggcttaaattcatggatgtttctgtgccatttctgaacatgattaaaggttagttacttaagtgccgcataacaatattagtactgttctgatctccattcacatgtatgaatccatcaaaacacaaaatgagtctttccagtggtgtatttaagcatttgatccagtggtatatttaagcatttgagtgaaatggtgttgggatgattattaaatgtgaaaaagaatgaattcttagcatgagaaaattaataatcagtaaatattttaaggcgtgtcttgtcctcttattcaaggcaatgggatttttgtatgcactttacgaacagtaaggggatggtccttagggtctagtaaatgtgagccatttttggagagtttctaagaagctttcacaaagcaaccaaaattattcaaaattgattttctgcactgtagcatggacatctatgagaataagactggaaataaatttttattgagttatatccctcttgaatattttcaaattacatagagtaactgtattttcctgctggactgtatagataagaagggtcacaattcccatctctttggaatctacaatgagcttctataaaggaatagcaagtggaagttaaagagaccaggtagcctgagagtctaggtcagagattgagtctacctttacttcaggagacaagagcaaacgatggctacatactgaagtgggtttgaaaatatgctgtgacaaggcagttcgagttgggaaaccatgataacagaagcagtttgtgagatcctaggcacatattggacatttaaaaatactgagaacatagcattctcctgggagcattctgctttctcttacaaaaaaagcgtacatttcttttttttctcctcctacatgagctgcacattaaaaacaaatctatatacattaggaaattctacctgaaatgctcactttaaattttaaaatttttgttgttcttgttgttactttttctttcttcaaatttaagtctctgagttcctttgtaaataaatctcagatcagaaaacaatgatattttctttcaggtagactttgacctatcttttggccctcttttgatttggaaaataattttcctacaaaatttatcatattgagattttttggagttatgtgttaaattgaacctttttcacggttactcacattccttattatgaaaacaaatagctttactttctcttagctaaatgtacatttgaacatcatagaatcaaggcccctcagacctggaaggaacattaaacattatataactcaattactctcatattactaaatctgttgcttttctgcttgatagctgtgttgtctgaatcaatatttcagtgaatgggaacatattaacttttgagatggtttattctttctttgaagagtctgacctttcagaaagtttttattattgaacaaaatctctctctaaaaaaaaaaaaatgggagccataaagcaagtgcggtttctttttccttctcttcaattgtttgcactttcccatcacgaccttccacttgcctgttgaatcttttcttccctatctctttctagcatttacaagtcattccactgaatattattttgaattcctttatcatcttggttgctctcctctgatcatgcttattgataaatatattatgtcaagtgtggcttctatatccgatcaccattgttcaggagtattttgtccagagcaaacaaaaagaaactgccacttttctggttctattagtatagcctggtatactataagactttttgatgggcatatttattgctgccgtatatcaagcttgctacttgctaaccaccccgcaactcccacccctggcctttattattgctgttctgaaggcacagctcttatcctctgcttgtgaggtgtttaagcaaaaatctgccacaaattgctatacaacaggcaatttgtggctaccaaacaatcttttttccccctactttagtgtagttactcttacaagtcattctgttcatatttaaggttggaagctcagaaaaaatatttgatttttaatttgttgctctttcaatttttacttctcagattttggttttctgtggtgggttagaaaatgttaaagaaaagccaaaaggattatttgaaatagaaagaaaatacactattcatttgaaagagcacctttagcaaggtatatacgtcttgtctggactaaaattatagcttctttgacatttctatcaggtacaagttttgaggaactgttactccttttattttgtctttacttgaagattcaggcaaagacggccttaaaaataatgactgtcatagggcaaaggcaacttttgcagttttagtactagtactagcactagtttagtactacttctctttcattctgggttctaactggctgaaaaatctgtgatttttttatttgtttatgtttgctctttttataattaaagagctctcaatcaaatccttttaactttctcttttatttgttctattcattgtctaagctgcaaactgaggataattttcatgttcatgtatgctgatttggtctttatatgtataatcaaaataaaattaattaatattttaaaagtaagtgggacaatcaagtgataggaattacttttgatgcttccatccttccaaaattttaattttgggggtagttttagcatctgaacttatgtaaaacattgcctgtattgacttagaaatacaagacccattcaacataaagcacagttcaaatgacgtagtgattgctctggcccactggaatcaacagcagctggcaacaaatatagtgcatattaattattactatgaagggcagagctgagagaaaaactgggtaaagagcatgtatttatgaagacaaagttaaaaagtaaaaataatagtcagatgtaagagaagttttctattatgtgtaatatatacatatcattccttaaagccacatataagtaataaagagcatcattaataatcctgaagtacacttttatatctctatgtataatatacctagtggacatctctgagatacccaattattatgtgccatactaacacattttctcttaaactaggtatttactcttttatccaataagaattgtttcagcacaaaatgggtacttttggcaactcaaaagacatctaaattagttttgaaaacaagagtaaatatagtcacaacatatcagcattttaacctcaatgtatactattctaattatttaatagaaattaatgacagcactcatcttttgagtaaaatattgctttgttttgacaacacagggattttgcattaggtgtaagacatcctaaatccattaaattttgacaagatcaactatagtgaccagaaaaggagagggagggagatttaaatagcagcaagacttaacatttcactcagtgaaagtaagctctgaggttttactccattgtagctcaaagataggtcatatttaagtgttgccgtacataagtacgtagttttcaaaagcctgttaatacatttttcgttttttgttgttataggcaaaaatgtaaggcagtagagcacttccattttccctataagattatctcatacttacatagcactgtgtgctaaatgctgttttcagatttaagtatttttattgtcatcttcttttcaaggtgaaaaatctgatgtatagaaggtcacagcgttcatatgaaagttgaccataagcaacttggctctaaaatcttctatcttaaccactatgctcacacaatacacaaataggttcacatgtacacttatacataaaaataaaaataaaaatggaccatgtgttcctgatctttgtatccacataactcctacagtagggctttgcatattttgagctcagtaaggacatgggttgcttatcaataactgattataataatcaacattattttttatctcatttttcctgactccaaatttatgaaatatattttaaggtcacaatataatttattgacccaactggaacacttttgagagaaaaagtgggtgttatttaaaattatattaggacaacaaggaaaaacaaggaccgtcccaggtcagccaggattgagggtcagcccatgtatgtgagggtaggaagctaagctcaaaagtttgtccaaattgaaaaagttgaataggttctctgcctgcaaagactatgcttttgtaattttataatgtataatcaaataattataacactttagaaactgcatcattatctattagtattgcaaaccacccaaaacttagtggcttcacaacacgtattcatttattttagaattttgctcaaattatttttttgtttgttttttttgtttgagacagagtctcactctgtcacccaggctggagtgcagtggcatgatctcggctaattgcagcctctgcctcccgggttcaagcgattctgcgcctcagcctcctgagtagctgggattataggcccacactaccgcatgtggctaatttttgtatttttagtagagatgaggtttcaccatgttggccaggctggtctcgaactctgacctcaggtgatctgcctgcctcgacctcccaaagtgctgggagtacaggcatgatccatcatgcccggccttgctcaagttcttgtagtgtgatctgggcttggctaatctcatttgagtttacccatgtgcctgcacttagcaggctggactagaagaaactggatgatcccatatgatctaaccaaaaacagatggtctggtgatgggctggctgttgactagtacaatgattgtgggggtgattggctgacatgtctgtcaccctccagcaggcttccttgtcaggtttccaagtgcagcagaagaagagcagcctaaatgtgcaagcgcttttcatgtctgattatattgtttgctaattgtcccactggccaaagcagcatacataggtaagcctatagtcaatgaggaaagagctagccccaggcatgaatacaggaggacttggcttgaaaaactgctgtattttcacttcaaatatgtctatcactcagtaactagtgtggcactttatggtgttgagaactcagaattagcttgagtggctctaccacgtgtggccttaacctcatgcttcaaggcatcagcatctgctccactcaatgggtagaaacaaaagtaacgggaggcacatggtacaattgcattgtctcttaaggaatatccccaaaagctcttaaaagatacattttctcacattctcatcgcatcacatctcttctcctcctattagccaaatatagtcacagcaccccaactaattgcaatggaggctgagaaatgcagttttattcgaagtagccatgtgcctagctaaatattctgttaatatggagatatgaaatggatattgggaagtgacaaggacactctgctacatttggctcctgtgattcatatatatgcaccaatataggaaaattacatgtttatatatatagtacattataaaataatacattttttcctcaaacattgcaaaccttctctctttcaaaaaatggtcagaagccagttaaaatttactaagcactttaatgaaatgcttgaggaaacaataatcacatttagaaacagacacttccatttgtttaagaccagaaactgatttatgattcctgttttatgttttgagaattctaggtagcatctgcattccggtggttgaggacattctttcagattttagcatcacttagttacccagagcaccatgcatgttatcagtcttaagcggagaaagagagattttcttcaagttaggaataaataaaaatctaaaaacttgtttattcatccaaggtcattttaccgagacagtggcaatctgttgttatctagttgaaaaccatttatatctgtgatttgtgtcatataagcaacatagagaatccaagatgagtcatatcaatgttctcatatgtactgtggcctgatataactgagttttacagtaacactttgacagtgtgaattttgaaaagcatcttttacaaaaaagtctcaaagcactttacatttgaaacataaaagctcaaaagaaaaaagttagaaatatgaagcagtaggaagcgtagattaatttgggagtaattacttcaattatttctaataaaatcattttgtatcaagtgaaaatagttttaagttttaaatattcattgaggattaagagtggcaggctcaagcctttatctttccttaaaaaatgaaccccattattctatattgagttaatagacttttatagttttttttaagataaagtatataattgcttagactaatcaagagggacagccaaatctatttatcttaagtgcagtcacattgcaataaccaaaaactaagactatggatggcaaattccttccactagtcaaaaattttgtatgtgattgtaatccaatatttttacctttattgtgatactttctaccttcatttgcttgggaatgatccttggacttattgtggttaagaatacagactctggagccaatttcaaaccccaactcaaaaattattaagctgtgtaacctagggcaagtcacttaaactttctgtgcctcaattttaatctctatacaatgcaaataacaatacctgccagttgttttgttgttgagatcaattaagttaatataattaaagaacatagaacaatgtctgtcacatagtaagtgttatttgagtttagcagttgttgcaattatctctaaggtttcttcctgctctaatgtttcttcctgctctaatgtttcaagattctattatcttctctatgatactgtttatatggacatataaactgtcaatggattctttatattacagtaaattgtataagcatcaatgtcatgctgcagataacgtaacagcttatgattagtaacatgctatatacagtaagaaattagttttaatggagcaccttctggaaagggtgccacttaactgaaaagcctgttttgaacttgcaatagtcaggcggaaccacatgtccaggtaactttctctagcgggtttgccactttttctcaacttcaaatatgcatgtgtgtgggggtggtgggggttggtgagatgatgggtgtgtatgttgttcaatgatatgtagattaaaatgtctaattcctcctcaatgaggaagaactggcaaacatccttagccacaagagaacaggagaactgtttcttctggaacagtccaggtgtatttctctcttggagagttttctctttgtaagcagttcagtttctagtaataactttctattgattcccaaagtatccttgtgcaagtgaaagttgagtatctatgtaattgtagcacaatttaatcctaaatataaaaaattattagctactcattccaacattattcagtgctaaaaatttaatgcagagatttttattaattttgtttctgttattctgaatatttctatattaaagaaggctttttttttaacttaatgtgccctctaaagtattggataaacactgttattctcgtggttagaatatctgattgcagaatatgttaattcttaactctgtctctcatatagtcttgaattcgaaacatgcaaatgtattacttactcaaaaaatttttaatcaataattaaaaaatacaaaaataaaaagatattttaaaaaggccttaatgtataaggcagttttaagaaagtataaatattaaatgaagttttaacaaaaacctctccctgcactgagctttatttttaattgtttttactctcatgtagtccatattatcttcagcatgttcccaaattaaaaacaattaaattccagtgtgtatgataaattttctccacttttagaaaatattatcttataaatcaactgggtactcaggctacagagtagaaacatgcctttatcttccattcaatgctagcaaaatttgaaggatgctaaattccctcacagtgaaaaatagatctccatgaggctgacacaatgtttgaaatttccacattatcattgttccttcagggctttgtggagacatgcattttaattaagttaagacattatatttccagggtaaatcatttgctacccaaacacaatagcatgtatttttccatcgtattaaaacgcattaagacacagcagaaccttgaggaaatgacatgaaatagaaaacaagtgtgtatttgaaaaatgaagatgtagagaatggtcagattcatgagagttgccaggttccagtgggcatttctggacacaaacatcacagggtttcaggagtctctggtggtttctcataaactctccaccatattattttggtgggaacttttgttttgttttccctgttttttgtttcgttttgttccatttaataatcagcactctaggacaagagccactacactggatgcaaccttgttttgcctgtactttggtaagccataatctcaaattgacattctatcctagtactgctgcggaaacttgcttttgccacatatatctacaaatttccatagactctttactaaaacaaaaaacaaaaactgcaggcaagatggtaataacacagcaatttatgaaaccttaagataaatggaaaataaatctgttattgtttttaaaatgaatatgaaagtaatagagactcccatttttgtcatatatttcattaaatattctgaaaacctcccccaatttgaaacaaataaaataaaataaagctataaaacacctaagggctcaagaaattatggaacaacaaaagaaaacaaaacaaattgcacacacacacacacacacacacacacaaacagctgaatttgtgtatacgtatttgtgtatacgtatttgtgtatatgtaccacataataactgaacagctgaaatccagaggaataaattgattctggagtggcaaaactcctgggagcattttgtaacctctaaagcaagaggttttcattttacaaactatgcagaataggacacaagtcttttgttttaagtaaagtgacagttggagctaacttatctgtataaagtggaattttgatgcatttcaacctcagtaaaagggtcgaatagcaaaatctaactcaccaacaaaaaagacaagaaaaattttctatctttccttgaggtctacgtaaaaaaaacaaaaattgtcttgaggaatgttaactacaggccagcttttaatgttcacacaggtttgagattcaacattatattatctacatcttacattttcagactcagaaaattccaaactgagaaattaacaggaaacaatgccatactatggcattctggaaaactgggcataatataacaaattctctctggagaaatcactaagctcaatgggttttatcccatgaatgtaagggcaattcaatttttgaaaatcaatcaagataactcactatcttgagaaaacattatgatcatattaattgatgcagaaaattcatttgacaaattccaacattccttcataattacactctttgaaaaccgagactggaaagatactctctaagcgtcataaagggcatgtacaaaaataccctaaagctaacaaaatatctgatgatgaaacactaaacgcttttcccttaagatcacttagtgctattttgcttacagaagaagacaaggatatccattttctccactcctgttccagccagtgcaataagaaaagagaaagaaagaaatagcatatgtattggaaaaaaataaagtctccctattagcaaacaagaagtttgtacatttatagaattccaaggagactgcaaaaacaaaactcccactactactaagtgagtttttaatgtcacaagatacagaataaacacataaaatcaattataattcttctttttccagcttttatgttagatttaggggcacacatgcaggtttgttaaactggcatatcgtataatgctgaggtttggagtgtgattgatcccatcacctaggcactgagcataggacacaataggtggtttctcaacccttaaacctgctctctcccttccttctgtaatagttcccagtgccaattgttcccatcattgtgtacccaatgtttagttcacacttacaagtgagaacatgcagtatttggttttctgttcctgaattaattcacttaggataatgatttggcttcctgctgcatccatgttgctgcaaaggaccaaatttcattcttttttatggatgtgtggtattccatggtgtatttgtctatatgtaccacacaaatagctgaaatccagaggaataaattgattccgtaccacatattcgttatccattttcccatggatggtcacccaggttgattacatgactttgctattgtgaatagtgctgcaatgaacatgagagtgcccatgtctttttggtagaataacttattttcttttgggtatatacctgacaatgtgtgggttccatgaaaaatctgcatgttataattcttctttctagcaatgaacaatagaaaacaaatttttaggctgggcgtggtggctcacatttgtaatcccaccacttcaggaggccaagatgggagagttcaagactagcctgaccaacatgacaaaacctgtctctaccaaaaatacaaaaattagccgggcctggtggcacatgcctgtaatcccagctactctggtgactgacgcaggagaatcacttgaacctgggaggtggaggttgcagcaagctgagatcacgccactgtattccagcttgggtgacagagtgagactctgcctcaaaataaataaataaataaattttaaaaatatgtataaataaataataaaacacaatttacaatagctcccctcaaaaggataactttagctaagtatatagtcaacatctagaggatttgcatgctgaaaattataaaatgctgaggacggaaataaaatacctaaataaatgagaagacataattttcatggattaggagacacggcacagtaaagatatcaatgtttttggatataattaggagcagattagatgctacagaagaagatactgacttgaagatatagtaatacaatcaatccaaaatgaagaagaaaaaacaaagactgcaaaagaatgattggaatctgagtaatcagtgaagaaacataaagtgacagacacgtaactgaaattctagaacagaagaaaaattgtgggaatggaaaaaatatttgaaaaagttagatctggaaaaaaagatgagaacaagatgtacccatgaatccacactcacaaaatctatgtcagaatagatcataatcaaatggatgactactagtaataaagaaaattatttatagcaactagatgagaaaaggcacattacatgcaaagaaccaaaaatgagaatgactgtagatttctcttcagaaactatgcatgtcaagaaacaaaagaataacatatttaaagtgctaaaagtggagaaatacttagaatttttaccagagaaaatgtatttcaaaaacaagagtgaattaaatttttttttcagcaaaacactgtgtgagaatttactgcaatatgccctcactacaagaaatgttgaaagagttcctcataataccagaaggaaacttggatgtacatacaggaatgaaggaaaactttttgtattttaaaattcctataaaatctaattgactaaagcaaaaacatgaataatattatggtcttcataacatatgtagaagtaaaatgtattatattacatgtgaaatgttataatattatttgaaggtaggttttgctaagctcaagatatatattgtaagccctcaagaaaaccttaagagaataataaaaggagtcttggccaaagagccaatagtagagataaaatgggatgttgaaaaatattcaatccaaaagataaaaagaggattagagaactatggaacaaatagaaaacaagtgtcaaaatagtagatttaaacctaaccatgtcaatgatgacattaaatgtaaacagtcttaacacaccaattaaaagattgagattatcagactggaaagaacacaaatcaattatttgtagtctgataaattaatttcatatataaagaaacaaatatattcaaagaaaaatgatgtaacaatatgtactatgaaaatatcaagcatatgaaaagatagattgactatattacatcacaaagctgacttcaaaacaaaatatgttactaaggataaagagggaacataaatgttcatagcagaattatttataataactgaaaacagcaaatatcataaatgttcatcaacagtgaaatggattaaaaattttggtatacctatacaatgtatcaatacaacaaaaagtaacaagttactgatgctggcaaaaacatgtatgtatctcataaatatacttagataaaaatgtcagatacaaaaaaagtagacatggtataattccatctatataaaactctaaaaacatcaaatacactatattgtgacagaaagcaaattagtggtttcttgggtccagggattagagcagggagggaattgactgaaaaacgcacaaagaaacttttacaaggtgatggaaatgttctaacatcttgattttggcgataattgcatgagtgtataccttccacatgtacatttaaaagggacttattttattgcatctaaaccatggttatataagttcattaaaaatgaatgaattaattattataggagtgaataaaaaacctgaagcagtaaaatttttgaggtgtataattgaaaacaatttcttttctttttcttttttcttttattcttattttcttttctttgtttttttttttgtttgtttgttttgttttttgaggcggagttttgctctttttgcccaggctggagtgcaatggcaggatctcggctcactgcaacctccgcctccagggttcaagcgattcccgtacctcggcctcccaagtagctgggattacagcatgtgccaccacagccggctaattttttgtatttttagtagagatgaggtttcaccatattggtcagctggtcttcaactccagaccttaggtgattcacctgcctcgcggcctcccaaagtgctgggattacaggcgtgagccaccgcgcccagccaattgaaagcaatttctaaggattaaaaggaccagagcaaactcattatttaataatatattcaaaacttaaataaaaaatttagtgttttggggcatagagttcataatactattcagactagcaaaggttgataactgaaagttaaacaatcgcggttagattgtatgggtgaaatgagcaggacagaaaacctttgattggaaaaaagtgtgttcaggcttctagcatactgcaggacttctatttcttgacctgggtggtgtttatttgatattctcttttcagtaatttaagctgttggctttattcattcttctgtgtatgaattatttttacggcacaaacgagaaaagccaactctggctgcctccacaccaaaccaccatcagaaacagtgccacacaattcatgataactttggtttcccccagatttaccttatatttttaataactgtaaagtgcacttttcccttaaactgttttttttttaaggtagagtctcaatcttgtcacccaggctgtagtgcagtagcgcgatctcggctcactgcaacctcccgggttcaagagattctcctgcctcagcctcccgagtagctgggattccaggcgcgtgccaccacgctcggctaatttttgtacttttcgtagagactgggtttcgccatgttggccagggggccttgaactcttgacctcatgatcctcccatctccgcctcccaaagtgctggggttacaggcgtgagccactgcgcccagcccccttactcttttataggctgtctagaggtgatctgggaagagagagccatcatcctgtgctaatttgccatcttggcaagaagcagaatccctatcatattttttttttgaattgtcacttgaattaacattcttgattacttgattgtcagttctgaatgagttttatcagaaatcctctgatatatacatatgggtatatatattagctatatatttatatatatttatgtattttaaatatataatttaaaatatatattatataagtatatgtaatttaaaatatgtatattatgtgtacatattatagtgtagtgtaaatatactacatatttatatatgtaattggtgtcatagtataaattttaattttattctatttctcatttaatatgtcatgaacatttttcatattgactatttaaatgtctataatttgaatgaccaaataatatgaacatacatgctatattttaccatttttgcatttattggtagataatttgattgtctctaaatttacattgctcataatttcacattaatgtattttcacatcaaattctgataatattcttagagtgaaatcttaaatgtggaattaattattggattaaaattcaattaggagttactggattaaagatagaaatacttttgaagtttttgatacttagcactacatttcttttcagacaactgttagtaatttaaacccttagcaacagtatgtgaaaataactatttcagtatacataacaggtgcaataatttttaaaactttgccaattttgtgttctaaaaatttctattgatttgcatattttactgctgtcaaagttgacattgtttatactttgactatttgctttatttcttatgtaagttgtctgtttatcattatttgtacccttttcatatgaagattatcattttttattggttgctagtaatcccttttacttatttttaaaaaatattttgtagtaactattaaaacatatacacttgtcttacttattgtaaatcttttttttttagtgtgtgttttacattttaatatctgcttttagaaaatttggctggtaaactgcagatttttaaacctatgtggcattgacccttttttatattgttcttttagaaaaaaaaaaaatttattttgagatttttaggtattcaactaagatttcttctatatttgggggagagcttaaaattatatatatatacatacatgcatatatgtacatacacacatgcacacacatatatacacatcagattcagaacaggaatctaacattttttatttatatgtcatgtatttattaaatataattgttttcatttgtttgaaatatgacatgtagaaattacatcttaatttttatacaaaataggatatctttgaggattttctattctttagatatttttatacccctaaacataaaaaatacttgtcatctttaatactgaatatatttagaaagatatatataaataagaaatcatttaaaagatttagaagaagaaatgaaaaaaaaattattgtacccaaaattttgggcaagattataagtgtaattcagcagaaaacttagatgtgaacattagggcaggaggaaaaaatgtatggttttatatactggtagtaaacataaaatataatattaattgaattcactatctacaagatattataaaatgtattgcatgtctagtctcattgaattccccctaccaccaaaaaacaacataaatgtaaacggggtctcctttttacaaatgaaaaagcaagacttaaaagaactacatgatttccctagtcagaaaaagtttggactagtcctcaaacccaaatctatctgactccaaagccatcatcttatctactgtgctatatactacttttgtcagattacagaaaacataaaagtttatctgttgagacaaatactttcctgtccctaaattctagaggaaatttatggtgtggctgttgagtaacaataatggataatgtcttcaactcacattttacagaaaatagagtaacatattttaaatggccatttcttatatcagcctttgatagcaacccagttcataacactgaatcataacttagtgcaggcatttctatagacatctaggctgagatagctcagatatgttgctatctctggtaaacctggttaaggaatgtatttgtcttatacccaccctgggtggggtggggcatagagattcagaagtcagggcttaattatgaagaaatatcaggcaaatgtcagattctataacagaggaaagtaagtcatgcagaaaagtcaatgtcagttagcagttacctgttcttaaaataactaacatagtttcttaaaggaagggcagagttgagaactgaagatgagttgataatttgttttttgcatcttaaacttttaagagtcatatagagttaaactcaaggaaaaatcaaaaaatggcagaaggacacgaagagcttcagaagcctgcatgatttgccactttatcccagcgtttagttaaatgctgagcatacagcatgtgttagataaatacttttgtgttaaataaatgaacaatcgaatgaaagaataagtgtattgttttctaaaaacataattttattggtgcattttataaaagagctgtatgtagagtgagactctgtttcaaaaaaaaaaaaaaaagagctgtgtgtgtttcttcatggttacttttaggaccacataaaacatttttaaagatttaattttgtacttttcctggcctcatgagaaaaaaaaaaagatttgattttggcttaagttttgttaattacttttgttgacaagagtttttccatcaattaataatggtaacaattatattcaggcactatataaatatatattattttattttatttttatatattatatatctatatatgtataaaatacatagaataattttatatattaatttctatattagattacatacatatacactatatatgtgtgtgtatatagaataatttagtgcatatatggtatatatgcacaggtagacatatatatatactatatatgtgcactaaattattctttgtacatcatttaaacaaatatttatcaaaattattatacattagatgttattattttttctttctgcagaaaagaaaacaaaaggctcagagaggttaagtatctctaagtctaaggttgcacagctggtaagtagagtagctaggatttttgtcctgtctatatcttctcaaacccatatgctttataattctgtaaaccaaatatagagctgcattttcttcattttacctctttgagaaatgctcattataaaagtttcaaataatcctaaagcttaaagtgaaaattgctttcatttaggatatatttacatatgagagcaaaagagatactaaggccaaggggagagagtgagagatttacttttgttctttctcttctttgcttgggtagcaattgactagcacaactcagagactatgtgaaccaaacttattttttttaggagtaagtcacacagcccagcagaaagatattgctgtatatatatttgatctctgatctcaaatgaacagctaactctacttagcattctgtgtttctctttcatgctcactactctattctcagatattctgtgtgttattttttacttttctaattatttcagtctctgccgaggtaccaagccatcagtgcaccaagataagctcatattttatagagagtataaaagtacttagatgggaacactctcctattcccaccactaaatctaccaactaacctgtttctgctgacatactagtgttgttgggattccacagagaagagcatgacattatgacttctgattttaaaattgatgaaaacattttcatgggccctgaaagcatctggaggcccctaaaactgttcctactgagcctaatgggtaagtagactctgaggaagagcctttcttactgtcaaatactaaccttctctgcaccctggattgcatttcctctcacctgctcaaggaattttactttggttctctctcctcattacattgactcctttttttgtactagatttttacccccagtatgaaaacaagcttcagtgtcttttcattttaaaacaaaaaagaagaaacaacgcatttatttataatcttctgcctcctgcccaccactgtctccgctcccatctagagataagctcttctcattctgtttttgagattggtaatttttattaataatatttttctgtattaatttttaataatatattattcttttgattgttatccaggagagttgcactgcctgtggcctctgctataaagttgaatatgaaaggcaatagcagacatccttgcatttttcacaatcttaaggagaaaacgttcaattttcaccattacaaatgatgttagctgtaggattattggtggataccctttaaccaagtctgggaagctccttctattcctagtttgctgagagtgtttatcaaaaatttatgttgaattttgtcaaatacttgttccatatttgagatgatcatatgatatctttttcttcaattgttgataggtgcattgcattgattgtttttttcccccaatttttttatcgtggtaccatatgcacaagatgaaattgactaaccattttaagtgtactattcagtggaattaagtacattcacattgttgtacaatgattaccaccatccatctgcgaacctcttttcgtcttgcaaaattgaaattctaatctattggacaataactccctcccttctcccctaatcctgccttgcctcagaccctggcaaccaccattcaactttgtctctgcaattttgactgctctaaataccccatataagaggaatcatatagtattttttcttttgttactgtcttgtttcgcttaacctaatgtcctctaagtttatccacgttgtagcattatgtcagaatttctttactttttaaggccgaataatatttatctatatatcatattttgcttcttcattcttccattagtggacagtcagattacatccacattttagttctgtgaataatgcttctatagtcatggtcatacaaatgtctcaagaccctgctgttaattctttcaggttccacccacacgtggaattgttggatcatatggtaattgtatttaatttctttattttcttaaaaaaatgtttgtggttacatagtaggtgtatgtatttatgcggtatattagatgctttgatacaggcatgtaataagcaataatcacattatggaaaatggggtattcatcccctcaatcatatatccatatcctttgtgctattacactctttaagttattttaaaatgtgcaattaaattactattgactatagtcaccctgttgtgctatcaaatactaggtcttattcattttatgttaaagtttttcaggaacagccatactatttttcacagtggctgttccattttacatttccaccaatggtgcagaagggatccagtttctctgcatcatagccaacacttgttttcttttttactgttcttgttgtcattttgtttttctaatactagccatccaaatgggtgtgaggggctatcattatagttttgatttgtgtttccctagtaattagtgatgttgagcatttgtatatactttttggccagttgtatatcttatttggagaaatgtccattcaagtcctttgcacatatttaatcaagttgtttggtttcagttgttgaattttaggagttctatgtattctagataataatagcttgtcatatatatgatttccaaatattttccccaattctgtggtttgattttttactctgttcatactgtcttttgatgcgcacaattttttaattttcctgaagactaatttgtctttttagttgttgttgcctgtgctttgatgtcatatccaagaaatcactcccaaattcaatgttgtgaagcttttgccctatatttccttccaataattttatagttttaggtcatgcacttaggtcacagatttattttgagttagttttttatatggtgttagataagggtctaatttcacttgttgatgtggacatccagtttacccagcatcaattgttgaacagactgtcttttcccccattggatggttttggtatttttgtcaaaaataatctgatcatatgtgtgaaggtttatgtctggattctctgtgctactccactgttctatatgtctgtctttatgccagaaccagggtttttattactgtaattttgtagcaagtttttaaatcagtaaatgtgatgcctccagttttgttcttctttctcagaactgttttgattattgagtcccttgagattccatctgaattttaggatgggtttttctatttgtgaaaaaatatgtcattgggattttggtagggattgcattaactctatacattgctttaggtagtatttacatcttaacaatttcaagttttccaatacttgaatactgggtgtttttctgcttatttatgttttctttaatttccttcagcaactttttgtttgtttgtttgtttacaatatacaagccctttagctccttggttaattcttaactattttattctctttgatgctattatatatatagttgttttcttaattttccttctgaattgttcattaatattttatagaaatgcaaccaatttttgtgtgttgactttgtattctgctaccttgtcaactttgtttattagttctaacagatgtttgtgtgtgaaatatttagggttttccacataaaaggtcatatcatctgcaaagagagataattttacttcttttccaatttggatacctgttattcctttttctcgcctaactactctggctaggtcttctagtactatgttgaataaaagtggtaaaaacaggtatcctttacttgtttctgatcttagaggaacagctttcagtctttctccagggagcatggttttcactgtggtttttcatatacgaatgttatgcattgactgatttttaaactttttttcagagtcagggtcttgctatgttgcccaggctggattcctgggctcaattgatcctcccatttcagcctcccaagtagctgaggctataggcactattgtgccttgctacattaactgattttgtatgttgaaccatctttgtatctaaggaataaactccaattggtcataatgtgttatcctttatgtatgtatttatatttacatatagctggattgcatctggtggcatatcgtcgagacttattgtgtcttttttcacatcaaggtaattctgctgttaagaaaaaaaattggaaaatattctttcttattttatattctggaaaatcttgatattattgatgttatttcttctttaaatacttggtagaaagccatctaggcctggagttttgtttgttggaaagttttccaatagcaaattagatttctttaatagctatagagctattctagttatctctttgttttggctgagttttcaccgtttgagctttgtaaggaatctgttcatttgttaatcccacttgttcaatttatggacatataattattcttagtattcctttactatctttctggtgcttgtaatgtttgtcctgatgttacttctttaatttctgatatttctaatttgagtcttttctcttttcctggttagtgaacttgaagttggtcagtcgggctaaagattgttaatttagctaatctttacaaaagaaccaacttttggtgttatcgatttttctgtattgttttctgttctcaatttcatagatttctactaatatgtttattatcttcttccttctactttatttagacttaatttgctcctctttctaatttcatatgatggaaactttgatattgttattgtaattttaaattttctgatttatatctgaatttggttctgttaataattttgtctttacagtgtgcttttttccttttgtgtgtatgtgtatgtatcatgtaatttttgcttgaaagcctgttatctttagtaaaactgtagaaactaagataaatagtatatattacagtatataagtatatatatagtatactaatatatggtattatatattatcatccatattattataaaataataaatcatttattttatgcctagaaatagacatgcctttatttacttattttatttatttatttattgctatgcttctagtgtgagaggttgaatcaatatagttatagcttaaactaagtttggattttcctattgctgtggttattgtcagtgcaccacagtctcagttctagaattaccttgtgcttcatgtgacgaatgctttgtcagctgactttcctcaatttatgattctatcttcaacttaaagttttttctttctacctgcactcagagagtcttaatgcacttgcctctctctctcccagcagtagactgcttttatttatttactctacacttgttagcctagtgacaggggtaggggttgtcttctattgttctagttcagccttagtattgggcagatgatctgtccctggattaagggtcttctcagtgatcttgcccctttctcagtggcagaggctctctaaatatctggtccagggtgctttcttgcttctttttttgggatagagggatatttattctattcctttcaaccaattgtaaagaatcttcccctattgcttgggagtgacaaagtatctgctcccctctcagggtcttaaagcttttgcaccacaggagagatgggagaaaagaacctgggtggatctttgtcttaatcagtttaagctgctataacagaatactatagattgggtggcttaagcaacaagcatttatttctcacagttcttgaggctgggaagtccaagatcaaagtaccagcaggtctggtgtttggtaggggcattcttcctggtttgcaggtgtctatcttgtatgctctcacagtgaagagagaggaagcaaggcctttaaattctctttctttaagggcactaatcttatcatcaagtctctgttataatgacctaattgcctcccaaaggctccacctcttaataacatcatatgggaaggtggaggcacaaacatgcagtccataacagccttttttgccatttctgtagtggctgatgtttcccttcccaaaactggcaccatgacggatggatgcattctcaggtttctcaccatattctcagtcttcttatgaatgcccaggaagagtctgatgaaaacttgcaagtgggcacaaatgtcttttgtgtatgtggttcccagtggtgataagctcttaaactagcccacatttagatttgggccatttatttaaaattttagctgaatgtcttctccctggcttgtatagaatctgatacctatcccaggtaagcaagtacttgcattctttcttttctctttcattgaggtaacacatagattgaggtcatagattcagttgggcatcccagttgtaaaatccatgccttttatattctaaaggcttgtctctttttcctcatacaactgaatcaaggttctgaattatcagaatcagccacaaattcagtgacaactcacagcattggctttctgaaccttctttgcttttagccattggcgatttccttttttctttttttcagctgaaacaattatttaaagaacattcacttttttgcacccaggacttttagatattttatgttaagcaacatttattttgtttattcattaattcatttatctttaatcttctatattgcccaaatgtcgggggcttcaagtattgcccatgctgccatttgcagttctcctgagataaaatcttatttttaattttaacatttatttattcttaaattttagacttgcctccataaatactatttatatttatactagacatatgtgtgtgatatttgtataaaatatattaatctactgtatatataaacaatcaaatgtaatctcttttaaaagatgaattaactcattttacatttattattatttctgaggaatttatttgaagcaatttaacttgtactttctactcataatgtttccccatttgctttctctttgatttatttaattgctattatttccctcctcgtcttaattgtttgaaagtgttatgttataatcctattttattagtgtttgcctttgcatttttagcatgcatatgtgtcttaatattctctgaaaataaacaatatatctaccctacactaaaacaatgtaggaatgtttgaatgtcttatttttacccactcatgttccatttaatatgcattgttgtctactatttaactccactcactttactttttcaacctctttaaaatgtcattataactgttttattatcgttacatttcacatttatttagctttgcccaaaagctcgctcaccatagcttttgacatgttgtaaagcatagagaggatttattaataataaactctcattttcagcttttatataaaactgttcttattttcctcttaatattgagttatagttttacagatatagaattctaagtttatagttattttctctcaactcttaaagatatgattccactctcttttggattctattattggtagagaaggtctacggtaattctaatgtagatgatttctcttttctcttttggattctgtaacctcacactctccttatttccttcctatctctgtttataccctgctgtagtcacttgtagctgatctttaagtattagagttattcaaggatataacctgattgtagtctttccttaagaaatattaccattcccaagtttttaaatattactataactcacaaattgatattttattccactcttacttttacatcgccacttgaatgcatgcaggcacttcagtcttacttaacatgccaaatacagaactcttgagcttcttctctaaaactatcactctaacaattctctttactgcagcaaatgacacatctaccattcagttgcctgtgtcataaattttagagttattctcagtttgccctgaccttcctcatctttcccatcaccacattcggttaaatatacattcacatttattcaaactcttttttttatatctttcaccaaagtagtgcaggtctctatcttctcttgccttgaccactgaaagatctctttcattggttttcttgatttcattcctgcttcctctgcaataatcttctaatcaacagtgatattcaaattttaaaagcataaaatatcacttctctgcatgaaattcctcactgaattcctttatttaaaagaaaatgcaaaatcctttatgtgaactataggttctaagaaaatcagctctctaaccacttccaggtaagtgtttactctgccaggaaaacactcctatttctacctggccaactcttaatcaatttttaggattcagctttaatgtcgctttcttaaacagacctctccatttgttccaaaaaactattacactgctgcaaaaggaagaagagatgatcaatcttggtaatccagattttgactatatcagtattcattgtgtcttaggataacatcaaagctagaggttaacataacaatgatattaaataataataataatgctaatacaaactaacatttactgccaggcattgttcaatttatcaaaaaatattgagagtctcactatagcccaaaaactgttttaagacctagcgataaagcagtaaactaaacagacaaagtctctgtcctcatggagtacatagtctaatggatctatcatgctaggattctcacagatagctagacaattgggataatttgaaaaagacttaattaaaaataagatatttgcaaagattttggcaaagtgtagggaaagcacaaggaatagtacaacaaatgggcctttgaaaagttggagctgtcattgcctctccatgaaatgaaaaaactactggaacccagaaaagcagtgattctcaaactttaccatgcctatgaatcacctggagctcatgttgaactgtagacttttgaatcagtaaatctgaattggggcctgagagtctgtttatctactcagctcccagatgatgccaatgctgaagttccttggatcatggtttaagtagcacagatgtagaagaaatcattcttaagaagagaaatgatcttcgctaaaagaaaacaatgagtctgaagtgaatcagttactaaaatgatccaagtaagatacataaccttacttcactcttctccttgcctcctttatgctgctggggtgctccattagtcaaacctaacaagatgccagagaagagaatttcttcatactgtcagtacagataggtgtcctgggcaaaaatcaggctacagaagagtggaggtgtctctggagagccaaacagaagatatctaacaaagaagacagacaataaacaaaaaagatgagtcagtacatggtctgcaaaacagtgataaatgttatagaagaaaaataaagctagattaagaagctagaaaagattaaggaataggagtggcactctcttggttttagaagggctctcaaataaagtggtccctcctaagagctaaatgggaagagagagaaagtcatatgtatatctgagcaagagcatttccaaaagagagaataagtgaaaagattgacaaagaacacagtgtgactggaacagagtgtgtcggggctaaagtggtagaaactgaggctaggttagagggacaagaccatgaggagagtggaagaaatagggagaacaggcaggcagttttgcaatggtctcgggagaaaattatagcttgtatcgtggtaatagctgagggaatgatgagtcctgttctaggtactttacatttattaaaccacttaatcttcataactacccagtaaagtagatgttatgattttgtctcaatttcacagataagaaacctctagaaagtatagcagaatcaatcatttaatcttaggtaatctgtattgggaaaaacattcattttgaataccagaactaatttttgaagactgtcttctctctcagacatcaagctcatgaataccattatcagtcattaagttgtaagccaatttaactgcaaaatattgtgaatatgatttttaaatttcctcttcaaccttatgtatatccttttagtatccatctttgattaatcttttttatttatttatttatttttgagatggagttttgctcttgttgcccaggctggaatgcaatggcccgatctcggctcactgcaacctcctcctcccgcgttcaagctattctcgtgcctcagcctcttgagtagctgggattacaggtgcccgccaccacacccagctaattttttgtatttttagtagagacggagtttcaccatgttggccaggctggtcgggaacccctgacctcaggtgatccatccgcctcggcctcccaaagtgctggggttacaggcttggagccaccgcgaccggcctgattaacttttaaaaatcattcactcttcatctatgtctatggcttcctttcccacaaccagtaagagtttgaattgctctttagatattctttagagctgctcttgactaccaataagatgataaatttttatctggaactctttctttcagctcaaagttggaggacttccctgatgacgcaatagtataatggacataagtctagttgttcaggtctctgttattgacttttgtcttcataatttataacttttctttaacttttagcactattgccaattcatgcactgaaacctcccatgaacataactttggtatgtatttatatttctgtaataaatctgtttcaactattgaaatatctttctgtactcacgtatttatttgcaagtgttgtggcaaatatagttataatggtggtattgattttgttttagtggcaaatatagttataatggtggtattgattttgttttagaaacagattgaggatcttcgagaaatggtgtctcttgcctgtcatcccagcagtttaggagtctgaggtgggaggatcacttgagaccagaagtttgagaccagcctgggaaacatagtgagaccctgtctctacaaaaagtaaaataaattagccagtcatcctagctgctagagaggctaaggcaagggtactgcttgagcccaggagttcaaggctgctttgagctatgatcatgccacagcttgggttacagagcaagattctatctcttaaaaaagaaaaagaaatagatgaaaatcaaggactatgatgtttttatttggctaaataaaatatactcagcatgatactgagttatatatactgtattctttcatgtatgactgtatattaaactaaataaattattccagttattcaaatactcttaatacaatttaataaagatccatgtctgcatcaggcatccattggcacagattttaaaacctataagaaaaagttttcaaaattgttttcttttgttattaattatattgcagaaatgagcaccaattttcaattgtttatgttaaagtatacattttcatttatcataatcacatttcatggattctttaatgtttcttaaatgtacagcagtttaaaaaatataagtagacaagggctacaatgctagatttcttcctttgtctctcatctctttgcatattataatgtatatttctaattctttaagctgctttattatttttagctgatatgaaatttgccaatgcataggatatggtataaatattgcta

SEQ ID NO: 13 - DNA, 46128 bp, Homo sapiens
attacaggcatgcgctgccacactcagactaatttttgtatttttaatagagacgaggtttcaccatgttggccaggctggtcttgaactcctgacctcaggtgatctgccagcctcggcctcccaaagtgctgggattacaggtgtgagccactgcctgtacgggaggggatgtggaggtgggggtgatgggggagggggtggagatttagaggtggggggtgaaggggatggggagaggatgtggaggtggggggtgaaggggagggggaggcgatgtggaggtagggggtgaagggaagggggagagggaagggatgtgggggagagggaagggaggtgaaggaggggagcaggaggggatgtggaggtggggggtgaaggggagggggagaggatgtggaggtgggggggtgaagggaagagggagagggaagggatgtggaggtgggaggtgaagggggaggggttgtggaagtgggggagaaggtgtgccaggcgatggagggggtcggcgggggcggggcccgcactgtccccgccccatgtgggtggagcctcctgcccgggcctgtgtcgcggcagagcctggcgggctttgtgcgcaggcgcttgcggcttcgcggggctgaccgtgcgcttcgcctgcggggtcgtgctggggcggcgggtgagcctggggggctgcagagcgggcgcggggcgcgtccgaacagtcgcagccccgagcccctgggaccgccttccccgcggaggcttgggctcagcgcctggggcggaggtggggcgggggcggtccgcccgcagcagggggtgccggggccgcctccgggtttcctccgctggatgcggcggtggtgcgctgtcggcccggcgggtgcggcgggtgtggggtcacgggtgtcgcgcgccgccctgggccctcctccgaggtgcctcgcgtggggcccgtgccagggcccgctgagtcggggccgctcgtgggccgcctggctgccgcctggggcctccggccgctgcgtcccgcggcttctgggaaccgtgcgcgctcacaggcggacttgggcctcgaacaaggttcctgctaaattgagttgtgccttaggctctgctggacagagcagctccactgcgttgacaaggagggggctcagggacagaaatctcagcgggaagacaacccctcctccgaagggaggcccatcagggcttcagagaaggggcagagaatcgcataagaggagcgtgtggtccggaggggcccgggcttaggggaggccctgaaagacccagtagaggaagggagctgggcagagggtgatagcagaggccagactggtctcaaactccaggcctcaagtgatcctcccgccttggccttgcagggcgctggggttatgggcatgagccactttgcctggcctactcaattctgttttaaatgtttctgtgtttgtgaagtgggacaaaaattgttaaagcaatgggaaacattgcaggtttaagttccactaaatcatactggagtcaaaaagggatgcggggatgtttccctcctttccttctgcagggtcaaggttacccagcggacgtgtgggggtttttaggagaattaggcgggtgcagagcctgccagatcgctcattctgtttcttccccccttcttccaggtacgctatttgaagaacaggtttccatgctcttagaggagcatcagaaaatgaacaaaccccaggtgagttccttttttagattttttcattttccaggggatttgctggcttttataaaattcgtttattcagatggacatttaaaaagctacttcaggataaatgaggagtgagaggcaactgagcagtaggcagaggtggctgcggaaccctgtggtcatgtgatcctacaatcgtcaaaggagaggggcagatttgtctttttttttttgacacagagtcttgctctgttgcccaggctggaatgcagtggcgtgatcttggctcactgcaaccttcacctctggggttcaaccaaatctcatgcctcggtctcccgactagctgggactacaggtgctcaccaccacacccggctaatttttgtattttttatagagatggtttcgccatgttggccagtctggtctcgagcccctgacctcaagcagtcctcctgcctgggcctcccaaagtgctgggattacaggcatgagccactgcgcctggccttcatttgtcttttatcttcctaatctgcacttcattttcactggccaccagaagaaacgaactagttactcttgggacagaaagatttcctggagtctgaaagaatgtctgaacatcgtcatggagcaaagaaccttgcagtgaacctccctgttgcctgtaattgttctttgttggaagttggcggtacaactcaggttttattagggggaccagagcaatatggactcaatagagactttttggaacatctgttttgatctaaggacaaaacctaaaagcatttggagaaatgaaagaaatggactgcctgtatttgaaataacttttccttacactctataggtgggacagcagatggttcaaagtcaaaccttttttttttttttttgagacggagtctcactctattgtccaggctagagtgcagtggtgcgatcttggctcgctgcaacctctgcctcctgggttccactgattctcctgcctcagcgtcctcagtagctaggattacaggtgtgtgtcaccacagcaggctaatttttttttttttttgagacagagtcttgctctgtcgcccaggctgcagtgcagtggcatgatcttggctcactgcaaactccgcctcccggattcacaccattctcctgcctcggcttcctgagtagctgggactacaggtgcccaccaccacgcctggctagttttttgtatttttagtagagatggggtttcactgttagccaagatggtcttgacctcctgacctcgtgatccgcctggctcggcctctcaaagtgctgggattacaggtgtgagccactgcacccagccaatttttgtatttttagtagagacgaggtttcactatgttggccaggctggtctcaaactcctgacctcaggtgatccgcctgtctcagcctcctaaagtgctgggattacaggcatgagccaccgtgcctggcctaaagtcatattctttggtgaatgtttctgcactatccattctctttttttgcttgtggtaaaatatacataacatcaaatttgccattttcactcttaatggtacaattcagtggcattaattatattcacagttgtgcagccatcaccgtttctatttccaaaaggttttcatcactctaaacaaaaagtgtgtctccattaagcaacaactccccatttctccctcccctcagccccggtaacatgtactttctgcctctgtgaagttccctattctaggtattttatataagtgcaaacatgaaatatttgtccttttgtgtctggcttattccactgaacatgacgtttacagggttcctttatgctgtggcctgggtcagagctgcattcctttcggcgcctgaataatattccattgtgtggatcgaccacattttctttacctcttcatttgcagatggacatttagactttttccacgttttcattgttgtaaataatgctgctgtgagcattggggtacaggtatctgttcattccttcgcattttagtctgctttgtgtgctcttgccacttccccgccacctgcccaggacgtcctgataaagcctaacggcagcctctttgcagttcagtccaatgcgtgtttttctgacctggccttcctagaacattctgctgcattggcattgaactgctttcaccttctagaaaggcccctctccctagtgtcttgtgacatgcttcttgtggctttattcctgctgctcagatttattggtgcccctcattgtgtcttcctccagcacattctcatggcttatgtccagatgtccatcctttactccctcatctttttactcttccagtctttcccgagtatttcatgccctctgtagtggtagggacgggaggcagggaaattctgggcagaagagggcgggtccctggcgagggccctaccctcaagccgaaaagcctgacactgtggtcgaaagtgagaactggccgggcgcagtggctcacacctgtaatcccagcactttgggaggccaaggtgggtggatcacgaggtcaggagatcgagaccatcctggctaacacggcgaaaccccatctctacaaaaaatacaaaatattagctgggcgtggtggcgggttcctgtagtcccagctacttgggaggctgaggcaggagaatggcatgaacccgggaggcggagcttgcagtgagccaagatagcgccactgcagtccagcctgggcaaaagagtgagactctgtctcaggaaaaaaaaaaaaaaaaagtgagaacttacatccctgttttcccactcaaatgttgccttttcccaaactacccgtggcccaccccaccccccccatcctgtgcccataaaaaccccaggttttgtctgtagaagccctttgtatttccatataaattttagggctgggcgtggtggctctcgcctgtaatccgagcactttgggaggccgaggcaggcggatcacctgaggtcttagcctggccaacatggtgaaaccccatctctactaaaaatacaaaaattagccaggcatagtggcatacgcctgtaatctcagctactagggaggctgaggcaggagagtcgcttgaatctaggaggcggagaaagaaaaaattagaaccagcttgtatatatctacaaagaaaaatttgggattaagattggaattgaacttgtaagatcagttgggggagaatggacctctttaacagtattcattctttcatcaacccagtatatttctacatctgtttaagtctttaacttatttcaggattgttttgtagtttacaaggcacaggtctggcacatctctcaaatgtatccctaagtgtttcatttttttttgatactcttgtaaatggtattgaattttaatttatgatcgttttttgctagtatgtagaaataccaaattttgtatgtttatactgcaaaattatcctgcaaccttattaaactcactagttctagcagctttcttgtaggttctgcaagattttctacatagacaattctatcatgtcatttacaaatagttttacttcttctttaatctctgtgactttttgttgttttattgcgttgactaaaaccgcctatacaatgttgaatagaaatgagatgcgacatctttgcctttcttattttaattttaggaggacagccctaagtctttcaccattactgtgatggcagctgttggtttttcataggtgctttttattaggttgagaaaattcccttttattcttaaactgttgaaagtccttttttaaaaatcaggaatcagtgttttgtcaaattcttttctgcatctattgataaaattatatggttttccttatctatttgttagtatcacaaattgtttgattattaaatattagtgttcacctggtacaaagctgttctaatattcttaccccatcttgtatctgtggaatttctagtgatgttacctctcacccctggtggcgataatttgttggtgttgcctcctcctcttctctgtctctcatcagtgtagctagaggtttgaaacatttattgatttttaaaaaagttttatatattactgatttttgtttctctgttctctattttgttgttttctgttctcacttttattacttttttctgactacttaggtgtaatttgctctttttctggtttctaaaaaggtagaagatgaggtcattgattttattattatttttttgaagtggagtcttactctgttgcccaggctggagtgcagtggcaggatcttggctcactgcaacctccacctctcaggttcaagtgattctcctgtcttagcctcctgagtagctgggattataggtgcccgccaccacgcccagctaatttttctatttttagtatagatggggttttgccatgttggccaggctggtctcgaactcctgacttcaggtgatccacccaccttggtctcccaaagagttgggattacaggcgtgagccaccatgcctggcctgctttcaaatttttaagaaaatatagtttaaggggcatgatttgcaaaggtgtatgtgtgggggtacattttctggaggataactgagtgttttatagagccaaggccgaaaagcaagctagttgagtgtaagaatctctgttagacttgtgactcttgtttgggaatgagtattttagaagatatttattgtggattcttgtaaggataccttgaactaatataaaccttattttatctgttggcacatagatagtgggctttatctatataggtcttattcatctgttttctctcacatctacgccatcctgtgatatttctccttaacatccatgacgtagtttaaggggcatgatttgaaaaaggggtgtgtgtgttgagggtacattttctggaggataactgagttttttgtagagccaaagctgaaaagcaagctagttgaatgtaagaatctctgtcagtctcatgacttgtgtttgggaatgaatattttagaagatatttattgtggatttttgtaaggatactttgaactaatataagtcttattttatctgttggcacatagatagtgggctttatctatataggtctttttttttttttttttttttttattgttcattcttgggtgtttctcgcagagggggatttggcagggtcataggacagtagtggagggaaggtcagcagataaacaagtaaacaaaggtctctggttttcctaggcagaggaccctgcggccttccgcagtgtttgtgtacctgggttagattagggagtggtggtgactcttaacaagcatgctgccttcaagcatctgtttaacaaagcacatcttgcatggcccttaatccatttaaccctgagtggacacagcacatgtttcagagagcacggggttgggggtaaggtcaccgatcaacaggataagaatttttcttagtacagagcaaaatgaaaagtctcccatgtctacctctttctacacagacacggcaaccatccgatttctcaatcttttccccgcctttcccccctttctattccacaaaaccgccattgtcatcatggcctgttctcaatgagctgttgggcacacctcccagacggggtggtggccgggcagaggggctcctcactttccagtaggggcggccgggcagaggcgcccctcacctcccggacggggcggctggccgggcggggggctgacccccccacctccctcccggacggggcggctggccgggcggggggctgatccccccacctccctcccggacggggcggctggccgggcggggggctaacccccccacctccctcccagacggggcggctggccgggcggggggctgacaccccacctccttctcggacgaggcggctggctgggcagaggggctcctcacttcccagtaggggcggccgggcagaggcgcccctcacctcccggacgggtcggctggccgggcagggggctgaccccccccacctccctcccggacggggcggctggccgggcgggggggctgacccccccacctccctcccagacggggcggctggccgggcggggggctgacccccccacctccctcccggacggggcggctggccgggcagaggggctcctcacttcccagtaggggcggccgggcagaggtgcccctcacttcccggacggggcggctggccgggcggggggctgacccccccacctccctcctgggcggggcggctggccgggcagaggggctcctcacttcccagtaggggtggccgggcagaggcgcccctcacctcccggacggggcggctggccgggggcgggggctgaccccccccacctccctctcggacggggcagctggcctggcgggggctgacccccacctccctcccggacggggtggctgccgggcggagacactcttcacttcccagacggggtggctgccgggcggaggggctcctcacttcttagatggggctgctgccaggcggaggggctcctcacttctcagacggggcggttgccaggcggagggtctcctctcttctcagacggggcggccgggcagagacactcctcacctcccagacggggttgcgaccgggtagaggcgctcctcacatcccagacagggcggcggggcagaggcgctccccacatctcagacgatgggcggccgggcagagacgctcctcacttcctagatgggatggcggccgggaagaggcgctcctcacttcctagatgggatggcgaccgggcagagacgctcctcactttccagactgggcagccaggcagaggggctcctcacgtcccagacgatgggtggccaggcagagacgctcctcacttcccagacggggtggcggctgggcagaggctgcaatctcggcacttcgggaggccaaggcaggcagctgggaggtggaggttgtagcgagccgagatcacgctactgcactccagcctgggcaccattgagcactaagtgaaccagactccatctgcaatcctggcacctcgggaggccgaggctggcggatcactcacggttaggagctggagaccagcccggccaacacagcgaaaccccgtctccaccaaaaaaatacgaaaaccagtcaggcgtggcggcgcgcgcctgcaatcgcaggcactcggcaggctgaggcaggagaattgggcagggaggctgcagtgagccgagatggcagcagtacagtccagcttcggctcggcatcagagggagactgtggaaagagagggagagggagatcgtggggagagggagagctttttttttttttttttgagatggagtctcgctctgtcactcaggctggagtgcagtggcgtgacctcagcttagtgcaagctctgcctcctgggttcatgccattctcctgcctcagcctcccaagtagctgggactgcacgcatccgccaccatgcctggctaattttgtttttgcatttttagtagagacggggtttcaccatgttagccaggatggtctcgatctcctgacctcgtgatctgcccttctcggcctcccaaagtgctgggattacaggcttgagccaccacacctggcctatctatataggccttgctcatctgttttctctcacatctaaaccatcctgtggtatttctccttaacagccatgtctccaaacactgcttttcactccatttcctgcttatgatttctgttgggctgacctcatttttttagtttctctgtcatgcttttccctcagttaactgttccctatgtttaataatttcaccttttcagttttgagggtcatctttttaaaaatagcaaatatatgtgtgttccttgcaagtttttcctcccttttccactatagcaggcggttttcatttttattttttggaaccaaggtgaaatatgtatttgggatttcatcccaggaggctgggcctgaaaatagagaatccatgatataaatcacacgtacataggaaatgttttaacatttttaacgtatacttaatttttctcatttctagaagtccagaaattaagagacctgataaagggaagccaggaaaatcgagatgcatatttgtggtacacttcagttctcagtaacaacacactgactaagaagagggaatacgtttttgggaaaaaccttaatctgggtgcaaacccagtttcttcaagaaaaatagcctgttagtatgactcatgtggaatgagtttgaatacgtttcagaatcaagtattagtgataaaaattatgccagtaataacactgatgaaattaatataagtgagaagttgccttttgatagtaatcaggaaaacactcatactgggaagaaatctgttgtatataaccaaagtgggaagtcaccaagtcatagtgaggaccttattaaggaacaggaaattcaagctttagcccacctttggaagctaatgaacatggaaatcccttccttgagaaggtagccaccatcacacaagagacagctcaaacaagagagaaaccctgtgattataaggagcatggggaaaatgtcagtgccacatcagctcccagagttcatcaagaaattcacacaaggaagaatcactctgaagttaacgagtgtgagaagtcaaccttcttcaaacatcagaaagttaatacaggggtgaaaacccagggagctaatgaaaatgagaatttcagtcacaagtcacatctcagtctgcctcatagaactcacacagtagagaaaacttttgaatgtagtcatggcaagaaatctttttgccaggagtcccacttcactgagcatcacaggacatgcacaagagagaaaccatgtgaaagtaataaatatgggaaaaccttccagaaatgacaacttaccaactctcagataatgcatcgagaagagaaaccccatgaatctggtaaaacccttgtgaagtcagccctcactgatcaccagataagtcaatcagaaaagaagctttatgtatgtagtgactgtaagaaacgtttttgtcatagctcagtcctaagagtccatcagagtattcacacagggagaaaccctatcagtgtaatgggaaatcctaagcaaaatcaaacttcagtcatcatcagagaactcacacaggggagaaaccatatgaatgtaaggaatgtaggaaatccttccatgtgaaaccaaacctcactaaacatcagaaaacacatataggggagaaacctttcaaatgtactgcgtgtggaagaactttcttccagcagtcacaatttgctgattattagagaaaacacacatgagagaaatcctgcaaatgtaatgaatttgttggccgggcgcggtggctcatgcctgtaatcccagcactttgggaggccaaggcgggcagatcacgaggtcaggagattgagaccatcctggctaacacagtgaaaccctgtctgtactaaaaatacaaaaaattagccgagtgtggtagcgggtgcctgtagtaccagctacttgggaggctgaggcaggagaatggcgtgaacccaggaggcagagcttgcagtgagccgagatcatgcctctgcactccagcctgggtgacagagcaagactccgtctcaaaaaaaaaaaaaaaaaaaaaaattaatgaatgtggaaaatcagtccttctactataagtcaaccctaaatgtccatcagggaaagcacacagaagagaaaccctataaatatactgagtgtgagaaatccttctataaatcagtgctaattatacatgaggaaacacagataagaaaccctatgcgtgtaatgaatgtgtgaaatccttttgtgtgaagtcaagtctcagtaaacaacaaaattcacaccagggaaaagccatatgaatgtagtgaatgtggaaaatatgaattcaatcctcattgtgtatcagagaactcacactggggagaaaccctgtggatgcaatgaatgtgagaagtccttctacaacaaggatgccctcactaaacataacagaactcacacgggagaggccacataaatgtaatgaacgtaggaagtccttacaaccctagttatacaccagagaactcacactggagagaaaccttacaaatgtaatgagtgtgaaaaatcctatctgaagtcacatctttttttttttttttttaattttttgagatggagtctcgctctgtcacccaggctggagtgcagtggcgtgatcttggctcgctgcagcctccacctcctgggtttaagcgattgtcatgcctcagcctcccaactagctgggattacaggtgcctgccaccatgcccagctaatttttgtatttttagtagagacaggctggtcttaaacccctgacctcaagtgatcagcctgccttggcctcccaaagtcctgggattacaggcatgagctactgcacttggcctgaagtcacatcttaatattcatctgagaaatcacacaggaaagagaccccatgtatgtaatgaatgtgggaaggccttttctatgaagtcaaacttcactgatcatcagagaacacactgagaagagaaatcctatgaatgtactgaatgtcagaaaacttttcaccataaatcaaccctaacagtacatcagagaactcatatggggagaagccttataaatgtaatgaatgtagaaaatctttctatatgaagtcagccctcagtcagcatcagaggatacatatatgggaggaacattgtgaatgtaaagaatgtgggaaaacctaccagaggtcacaccttgctaaacatcatcgaaaatacaccacacaagaaaccctatgaatgtaagcaatgtggaaaaaccttccagaagtcacacctcattgaacatcagaggacacacccaggggagataccccatgaatgtaataaatgtgggaaatccttctgttataagtcacccttgaccattcaccagagaactcacatagaagagaagccctataaatgtagcaaatctgttacttatttctgtatgaaatcacacctcactgtgcatcagagaccccataccaggaagaacccttttgagtgtaatgaatgcaggaaaatgttttatgtgaagtcaaacctcatcaatcatcagagaactcacacaggggagaaaccatatgaaggcaatacatgtgggaaatctgtatgaagtcatcctccacacaagagtgatactctgaattgtaacaaatatgggaaatcctcatgtgtaaagtcaatttgtttttcaaaccaaaattcatggtagaaaccttatgaatgtaaataatgtaggggtctccttctgtgtaaattaaatccttagttggcatcagaaaacacaagatatagggactggaggcctctccacaaatgaaatggatatgggaagattttgtgttatcttagaaaatactggccgggcatggtggctcacacctgtaatcccagcactttgggaggctgaggcagatggatcacctgaggtcaggagttcaagaccaacctggccaacatgaggaaaccccatctctactaaaaatacaaaaattagccaggcgtggtggcaaatgcctgtaatcctagctacttgggaggctgaggcaggagaattgcttgaacctcggaggcggaggttgcagtgagccaagatcatgccattgcactccagcctgggtgacaagaatgaaaactccatctcaaaaaaaacaacaacaacaaaaaaaaaaccagaaaactcaaatgaggagagacccctgagaacatcttgtatattagtatccaccaagaaatcaaatacagtatgtttcacataaatcacagggaaaaaccgatagaacagtaatataaaagcatttacaaagttccagcacatttgcacaacatatgattgatactggtgtaaaactatgttttctatgcatgaaagctttcaggaaaaattcaactataagcagacaattaatactgaggggacgtctatcagtttaggagatagagatactttatttttttgagatggagtcttgctctgtcgcccaggctggagtgcagtggcgtgatctcggctcactgcaagctccgcctcccgggttcacgccattctcatgcctcagcctcccaagaagctgggactacaggcacctgccaccacacccggctaatttttgtatttttagtagagatggggtttcaccatgttagccaggatggtctcgatctcctgaccttgtgatccatccgccttggcctcccaaagtgctgggattacaggcgtgagccactgcgcccggccgagatacttttttttccctacaaatactgtaatactagaagtcacatttcaggtaccaaatttagcaaatgtgatgtgtgatacatctaatgctaatgacattcattgttggaagatgaagtcttttgaaaaacaagttgcagcagcaagctgacagtattagatatttgagtacttgaggtaagatggccttacatttgttagtgggcagcatacaacatacatacatggcctgtgtttgatttacatagtggaactccaccgagtggtcagcaggaaatatctctccatagcttaagaactgttgtaacacatctaccacacaaaatgcctccagtgtatctttgtatctttttgtttgtttgtttttgggtcagagtctcgctctgttgcccaggctggagtgcatggcactatctcgcttcactgccacgtctgcctcccagtttcaagtgattcttcctgcttcagccttatgagtagctggattacaggtgcctggcaccgtgcccagctattttttgtatttttagtagagacagggtttctccatgttggccaggctggtctcaaaacttctgacctcagttgatctgcccgccttggcctcccaaagtgctgggattacaggcatgagccactgtgcccggcctctttgtatcttaatagtacagtatacttgatatgtgacatgtatgacatttgcagtatacaatatgttattgagaaatgcagagtacagaaaactatatggcttgctgccttttgtttgagaattgaggggaagaaataatacgtatgtacatagatattttgtatatatatttatctattatatatgtttatatatttttttaatttttaaattttttgtagagatggggctcgctatgttgcccaggctggtcacgaactcctgggctcaagcggtcttcctgcctcagtcttccaaagtgcttagattacaggcatgagctactgtgcttggccaatatattttatataatatatatattttgcaaataagtataaactacaaactacaaacctgaagagtaaattacaaactcaaaagtgaatgcctatggagataggagtgaacagggtggcagggctgaggatagagacaaggcttcttcacgtgtagctttttgtgaagttttgacttttggataaatatgagtaatttacgtactcaaaagcacattttgaaattgaaaccaaagaagaaatcaactgaagtttatatcaaattggtaacttcactaagtagaagagctcattctttcaagagacttttaaatgcagtatgatgagcatatccttagtgggatttgtttctgttttaggacaaaaagaacttaaaaaatgacatttagaagacacctggctaggtctcttcaaaaagctgacttttttttgagacggagtctcactctgttgcccaggctggagtgcagtggcgcgatctcggctcactgccagctctgcctcctgggttcacaccattctcctgcctcagcctcccgagtagctggggctacaggtgcctaccaccacacccggctaattttttgtattttagtagagatggggtttcactgtgttagccaggatggtctccatctcctgacctcgtgatctgcccgcctcggcctcccaaagtgctgggattacaggtgtgagccaccacacccacctgctgccatcatttttaaaaggagagaaaaggtggagggactatttttcaagggcaaacatgctgaatatagaaagatgaactggcttgatgtctgcagccttgaagtggctcaggaaaaagatgcatgcatcgataaagcaaaaatggcaaaatttaagcaagtgttgatctggcaggcacatgggtattgactgtttttcttacaagagttgtgtttgaaaaatttgataataaaaagttttggagaagtactgtaccacttagcaattctgttactgttctttggcgtatataaatagctctgcccgtgcttattgatctgcttgtcaataaagaagccaaacagtaacctttaaagtgttcagttgttttgggttttagtcacttcaataaaaacagaacataaccaaaggctggtcatggtggctcatgcctgtaatcccagcactttgggaaattgaggcaggaggattatttgagcccaagaattcaagaccagcctcggcaacacagcgagaccaccttgtctctgtaaaaagttgaaaaattagccagacatggtggtgtacacctgtggtcccagctacttgggaggctgaggcaggaggatctttgagccagggagtttggctttgcagtgagctgtggttgtgccactgcaccccagtctgggcaacagagcaagaccccatcacaaaaaaaagaaataatgcaaaggcagcgtattataccattaacaactcaagcttgtgttaagaactaggtgcaaacagtagtgctcattgcactgacaatgaaaatagtattgtataaagaaaatgtgcttctctttctactcctgacacgtttctaagcggtgcctccagaagtacatggcataggccccaagcggtaggagcccaggaaccatttgccaacagggtggcagctgttgtgtcctcattctttctccctcctctacctggatttccttgcagcagggggcagactgttctaggctgctttgttgcatgaaagccttggtgtggcctgttttccccccctcaacagggactgtttgggttgggcatatgaccaagccttgacctctaggatgtgtagggaagtgttctgtatgatttttgggaaagggtttatcactgatgaagagacatgagcagaatcacattacccttctgaatacatccattgtttgcgtcttgtggcccagggctgtagttggaggttggtgagcagagatagaagagcctggccactgatggtatgaagcactgatttaacccacactgaggaggctctggattgggcacttgaggtcattagtttttcttattgtgtaagcctgttggagttgagatttttctgtgacttggagctgtaaggcatcctaactttgaagagggatagtttttgtttgtagagaaagggtctctatgttgcccaggctggtcttgaattcctgggcttaagtgatcctcctgccttggcctcctaaagtgctgtgatgacaggatacatttttttaaaagaagttgtgtaattcagaagtgttagtcacagtgatttgggggcaagaatgattttgagaaaatgattcagcagctgctttctgctctgtacatttatatgtaataaggaaatgcaggtacccttgaacagcacaggtctggactgagcaggtccacttgtaagtagtttttgttttttttcccaatagttggccctccttatctgcaggttccacatctgcaaccatatacagctcaaaactatagtattcacagaatgcaaacctgaggatacagagggccaactttgtatacaggttctgaagagtcaacttcaaaacttttgtatgcggagtttggtatccacagggggtctggaaacaattcccccatggatactaaggggcgactgtaatgtcatttcttatttgcaagaatccagagcggaaaatgttcttttcgaaattagttgcatattaagtattctttctcttcatataaaatgtcatttttaattgatcaaattattcattgccttttttttttgacaaggtctggattcatgtacggatgtaatctttacttttgcaatgaactgctagttgtccttacactatttaagaaatccatctctttgtccctggtttgaaatactatttttattttattttatttatttatttatttgttgagatgaagtcttgctcttgtcccgcaggctggaatgcaatggcatgatctcagctcactgaaacctccacctcctgggttcaagcaattctcctgcctcagcctcccgagtagctgggattgcaggcacctgccaccacatccggctaatttatatatatatatttttagtagagatggggtttcaccatgttggccaggctggtctcaaactcacggcctcagatgatccactcgcctcggcctcccaaagtgctgggattacaggcgtgagccaccatgcctggccgaaatactacttttatcatagggtaggtcactgttagtagtgtctttgctttttgtgtgctcagcactctttctcacatctttgtagaaagagaagctgaaaacctggagagctggaagttctctgggtgaccattcattcattccaccatccttttggcccatcttgattttaccagggaaggacattcaatctgagaggttaatgacagttgttgggaggttgtaatgggaggtcattgtagagccgttttttggtttggtttcgcctgggagttgtcagcagcttggttttattggtttttgtctaatttacagttttagtcctgcttggcatagcttgtgagtcccgttatgctttgcttaacaacagagatatattctgagaaatgcttcattgtgtgaatgtcacacagcgtgcttacacaaacctacgtggtaaagactaccatctgggctgtatggtatggcctatcgctcccaggctacaaacctcaacagcatgtgactgtactgaatacgctaggcaactgtaacacagttgcatttgtgtatctaaacagaaaaggcacagtaacatgcggtattagaatcttatgagaccactgttgtatatctggtccatcactgatcaaaatgttatgtggtgtgtgactatactccaattctgagttttattctattttattgaactatgaatactttatgctaaagaagatcatgttccaattcctcttgctttgtaatcttttccatacatcaaagaacaatcctgtttttcaagctttttggcttttcctacaattcattctcagagatgacctttagaatagactcaccaggctcttatttccaaagcctgtagggattatgactaaatctgcatttaaatttaacctcagtgaactgcccactgaggggggccactcaatccagctggcttgaacaatctcttgatgaccagagactggggggtcactccagctgctctccccgaccccagggacatcaccatggcccactgagcattcctggggccccaggcctgcctcatcttccttccaattgtctcctttctaactttctttggggaaggtggcacctaatttgaatgccctagaggttgactgtttacctgccggctttacccagggacttgcagcttccaggtagggtaggaggaattttttgttggaggcatttgctggatgccttctccattgtttcagtggtatttcctcttaacaaatgcaaacgtaacagctcacacaatagaacttcagttttcaatcacaccaagtccaaaatcagcactcttgttcagagagtggcttccagggacttcagtttttctataaatggcttctcagttctccttcaggtttccaaggtcaatctgctcattagcagaaagggagagaggatggagaaggcacactggctttttggccacctcacctgtggcaagtgatgcaacaattctgccccactggtgacaatgtgtcatgaaggccccatttgtgcaaatggctggcaggtctcatctgcctggacagttgtctctgtcatctttcctctgctctggtcctgacaggcatctaggcaactctgttgcatcctaaggctttgctttcccatcttacctgtccatttgtccagctgtctactcacgtcctgagggccaaaacctagtcacctggccacagctagctaacaggaaagtggagaaatgaactctccagttacagcctgaacaacacagtgagactctttctctacaaaaaaaaaaaaaaaaaaaaaaaaaaaaaaaagctgggcatggtggcacacacctgaagtcccagctatctggaagggtgaaggggggaggatcacttgagcccagtaattggaggttgcagtggactatgattacaccactgtgctccaacctgggaaacagagtaagtctgcctctaaaaaaataaagaaatctcattaggtacccagctgagacttgaggaagagggaatcctacaaagagggggaacactgtagtgcaattagcagtctgttgcagagttctgtcatgcgatgcagatactcatagatggagtattcgttcaacaaagcaaggatgtgtccaacagtttgagcagcccaaccatttccatgaaagctggcacagggcaaagctgctaaaaaaggcacagacatcacttaggcacctgagccatgaaaatgtggctaaaactgaacagactatttattatcaacattggttactttttttttttttaaagatggagtctctgtcactcagtctagagtgcagtggcgcaatcttggttcactgtaacccctgcctctgggttcaagcaatgcgattctcctgcctcacgctcctgagtagtggggactataggtgacgtgtgccatcatgcctggctaatttttgtatttttagcagagacgggatttcaccatgttggccaggctagtcttgacctcctgacctcaagtggttcacccagctcggcctcccaaagtgctgggattacaggtgtgatcaacgttggcttctgcaaggacctggctatgatttgaatggttgtcccctacagaactaaaggtagcatttttaagaggtgattgggtcatgagggctctgccctatgaaaaagttaatgtgttaatgggttaatggattaatgggttatcagaggagtgagttagttatcactataaaaagccaggttggctctctcatgagcctcctcacaatgtgatgccctctgcacctcagcactctgcagagtcgccgccagcatgaaggctgctaacagacgcagcccctagaccttggacttgccagtctccagaactgttaaatcaatgtctttcctttataaattacccagttttagatattcagttacagcaacaggagatggattaagacagaccccctcttattttacctgattttctttcctcttcataccagaccccaccccattccctcccccataggtgttacatgaaatttatgacgttaagtagtgttgtgaacctatataatagatgtgtgtgtaggtatgagaaattttgacattttgtttagctatattaaatattgttgaatcagttttcccattcatatctaagagattttatcaaatgtgctacatgccagtctagcattttacttctaactgctcacagccttctactgcttgtttcacattttactaacctctgttaaggatgttcacctaggatgtctcataaatcttgttacgaagaaattccagtctataaagacaaatttgcagccaggcgtggtggctcacgcctgtaatctcagcactttggaaggccgaggcgggtgggtcacgaggtcaggagattgagaccatcctggctaacacagtgaaaccccatctctactaaaaatacaaaaaattaggcgggcatggtggcgggcgcctgtagtcccagctactcgggaggctgaggcaggagaatggtatgaacctgggaggtgagcttgtagtgagctgagatcgtgccactgcactctagcctcggtgacagagtgagactctgtctcagaaaagaagaaaaagaaaaaaagaaaaatttgctcaatctaaagtaaaaccaacaagtagaatatatgaggatattcagcaaataataaaagggtagtatactaaaaaaaaaaaaaaaaaaaaaaaaaaggatataacctatacctgaaattagtggttacaaaatgcaagttgaaacaacaaaataccccattcacatccttcagaacagcaaaaattacagagacatatagtaaatattggtgaagatgtgaatggtaattgaaaaggtttcgtgctataaaatgacacccattctagggaagtgaccaggcagtatcttttaaaattaatattggtctggcacagtggctcatgcctgtaattccagtactttgggaggccgagacgggcagatcacaaggtccgattgagaccatcctggccaacatggtgaaaccccgtctctactaaaatacaaaaaattagctgggtgtggtggtgtgtgcctgtagtcccagctactcaggaggctgaggcagaggaatcacttgaacccgggaggcggagcttgcagtgagcccagatagcacgacggcactccagcctggtgacagagcgagactctgcctcaaaaaaaaaaaaaaaaaaaaaaaaaaaaaaaaaaaaaaaattaatgtctgtgccttatgcaatgtataccatcagtttatatgttccagggaagttcattcacataaggatatatatacaaggaatttcatcataacaacagtgcagcaattagaagtgctggttttgcaggtagaacatttgataaaatcatttaggttatgaatgaaaaaaaggatggaacaagattttctttttttttttttttttttgagacagagtctcactctgttgcccaggctggagtgcagtggcacgatctcagctcactgccagctccgcctcccgggttcacgccattctcctgcctcagcctcccgagtagctgggactacaggcgcctgccaccatgcctggctaattttttgtatttttactagagacggggtttcaccgtgttggccaggatggtcttgatctcctgacctcgtgacccacccgcctcggcctcccaaagtgctggaattacaggtgtgagccaccacgcccagcccaggattttctttatttttccatttggcaccacatcaatctcttccaatttgaggcctttcgttcttttttaattacaagaaaattttaattcgtgtattttcctcgtgtgttgtctctttttcttttgggaattgtagtatatggttatttctactatcctctacatctcagtttttgatttttcactttccatttcttcatttcttctggtgtcctggaggaaatatttgcctttacaacagagcctgctaactcgttctttgggtgtatcgcatctatcaatctcatctattatttccttcatgtcgattatgcatgctcaacaatccacttttcttttggtaactatatttttacacacaccccattcatctttatatttttcttcaaagatacgtattaaggcggggcgcagtggctcaagcctgtaattacagcacactgggaggccgagatgggggggatcacttgaggtcaggagttcaagaccagcctggccaatatggtgaaaccccgtctctactgaaaatacaaaaattagccaggcatggcggcacgtgcctgtaatcctactcaggaggctggggcaggagaatcgctggaacctgggaggtggaggctgtagtgagctgagatcgcaccactgcattccagcctgggcgacacagtgagactccatctcaaaaaaaaaaaaagatatgtattaagaacattttgaaatctgtctggatgcccatatttcattaagttaggccttctcatgtaaatggtattgtgtactgtctcttagtaccaattcctcatgtgtctgactactttcctgaatgtttacttggatactgtaaatcttggctgagaatgaatagcagggagaaggcctaatcctcctgtttcttcctgttgggtgggtttaagtggaggagtgtgttacagaaaaaaatcccctatcaccaatgcctggaatgagacccccccccgccccgcttgactgaccctcaggataccacttgacatgatcaccctaaatactgcctccttaagatgtctccagtcgactgggtgtggtcgctcatgcctgtgatcccagcactttgggaggccgaggcaggcagatcacaaggtcaggagatcgaggccatccgggccaacatggtgaaaccccatctctactaaaaatacaaaaaattagctgggagtggtggctggcacctgtagtcccagctacttgggaggctgaggcaggagaatcgcttgaacccggaaggcagagtttgcagtgagccgagatcgtgccactgcactccagtctggtgacagagcaaggctctgtccgtctcaaaaacaaacaaaaaacaaaacgaacaaacaaaaaaatgaatgtctccagtcgtagcaatgactggcttttgaagtgaggagaggatgctctaatggaacctaagtgctcccataggaccgagctgctctcctatcttatgaaggcaccatggtgggctatcatctcctgggcatactacagaggaccataaatgtatagggaaaaagattacaattcaactactctttaagatttgttctgtctgccattacctttcccgcaaaagagccccattcacatccttagttctctggacccaaacactgctcttatttccgtggcacctccgggcttgcactgtaacaagccagcagcccatgctagtgcatcaatttggcaggaatcatagactttatattcaatgaagggaaaatcaatttatttttgatgtagttatctctgtgataggaagaaaaaagcaatataattttaagaatgtatttcctggtgggcttcattttaagatgggccaaaaaaatctcttaatttatgaaaacattggcatcttttaaactataaacatgttactatgaacactgactacattactgaagaggcagttcaggaccacttatatacgtaccagaccctttgatgtgcaggcaatccataggataagaagaaaatgccaagccatttacagttttcaaatattttactgaaaatgcatattgtacaattaatgtataatgacacaccagtgtgagaaacctccataggtatcatttccacaaatatgctatgaatatagagttcctacacaaaactatacaacttaccagatgtaattcctgttacgtaccatactcacaatcgtcttgaagaatatggagaaaaagtgctgagtgacaaaaacaggagccatgtgtgattttaataaatggaaaacacggcatttcagctcagtggtaaagcagtaaaccaatcagatgcttagctatcaagtaatcatgtgagaggaaacagaattagatccttacctcatactatatgttgtcagctaacactgtagcagtggtatatgaatcacataaattacctccaacaaaatgtattccatgtattagaaaaaaggaggtatgcctaacattgtgtcacgttccaaaggtgaattttgcaggtcaacgatatgacagttcaaggaagcatacattttattgtttcaagttgatttctaatgctcaaactatttacgtcaaaatttacagaaaataaatctctatatcaacagcttaaaataaatgacttacctaaagtccacttctgaactgcataactcctataaaggtttcagtctgtaccaattagaatgtcttcagttattagtaatagagcatcctaaatcaactggcttaaaaataagtttagtctctcacaaaagaaacagtccaaaggaggagtggctacaaggctgcttggtttggtggctcaaagacatcatccaggtctcagggtctttcagtatttctgctcaggccatgattaaactataatccattgctgaaagatggttaccaggcaccacatccagacaaggtactgttcaccacaagattccacttccctttgcttgaatccttgggcctttgagaaaaccttttccagaagtagtctgtcaggtatatcctttgttttatgtctagaattgggccctgtgaccactgtaaatcaactgctggcaacgagaaggggagtgtcactggttaaaactaatcaggatttatctcacttccttttgaggataaatggataaccaaactccgccagcagagtaagggagtgactaagaaagtcactcggcaatgtctgccacagacccttgttagaatgtgttcttaattcattaacaggaaggagtagagcacaaggtttaaaaccagtacgacatcaaatgaaaacacagtgaattcctatgttagaaagtcactcggcaatgtctgccacagacccttgttagaatgtgttcttaattcattaacaggaaggagtagagcacaaggtttaaaaccagtacgacatcaaatgaaaacacagtgaattcctatgttacacagcattgtgctctgcactgttatgtaagtgtccaaataaaaaacagtagaaaaaaaaatagatacaaatgggaatattttaagtatatcttaaaactgtatagagtgcaatgattttctcactcttggaaaactggcattattaattttaaattaccaagcaaagttttctatctattttatacatggatatttatctctctggctgactcagatacagttgaaaacattataaaagcattggtcctttagagctgatattgttcattaagaatgatcaatgcattaaatcctagagaagagtgcaagaaaaagtatactttatacctatcaaatgatattaatgtagtgctgtttagaatactcttactatatgaattacaaaataaggatacaacgttttttcaaacatgattcgaagtgaacatacaattcctgtaatgtactgtaataaaaacaaccctctccccaaacataagtcctatgttctttgggaactgcttacatgagtttaaggttaccgacttaactagctatcctgatgactttacagtttctatttacacaagaagtatgtttattcacagcaggaatcttctatttcttttttttttttcaagtttgctattgtatcagaaacatatcttttagtattaacagtttccaaaggattatgtcttccacattccttatactgatagatttccccttggctatgatttccctgatatgcaaaacagttccaatccatggtgacatgtatatacattcttaatatttataaatttttacttgtctatagtctagtattgttataccatgtggtcttgttataatcatggtttccattctgtgagtcttcagattatgagtccaacacacaaggggatgtccacactaacctgtgtgaactctctgatgtacaaggtgtttgacttcaggcaggagtttctgattcactatactgaaagggttctctgatataaaatgaggtctgacttcagagaagccttcccacatctattacattcatattgcctctcctatgaattctctgatggctgttgaatgctgatttgtggtagaatttttttccacattcagtacactcatagggtttctctcctgaatgagttctataatgtacagtgaggtatgacatccgagagaaggcttttccacactcattacattcaaagggtttctctcctgaatgaattcgatgatgtatagtgagataggacatctgagagaagcacttcccacattcataacattcgtaggctttctctcctgtgtgtgttctctgatgtcgattaagggctgaattctggcagaaggttttcccacattcactacattcatagggcttctctcctgaatgaattctatgatgtatagtgaggtatgacatctgagagaagaattttccacatatatagcattcatagggcttctctcctttgtgtattctccgatgtctacaaagggctgagttctggtagaaggttttcccacattcactacattcatagggttttactcctgaatgagttctatgatggatagtgaggtatgacaactgggagaataactttccacattcattacattcgtaaggtttctctcctgtgtgcactctctgatgtctcatgagggctgaattcaggtagaaggtttttccacattcattacattcatagggtttctctcctgaatgagttctataatgtacagtgagatatgacaaccgagagaagaattttccacactcattacattcatacggtttctctcctgtgtgggtcctcaggtgggtcgtgagagtagacttgcggcagaagcatttcccacattcactacacttgtagagtttcacacctgtgtgaattttctgatggtcattaagtgctgacttctgcgagaaggttttcccacagtcatgacaaacataaggtctctctcctgaatgtgttctctgatgttgtgtgaggtgtgtcttctggcaaaaggattttccacaataactacattcatagggcttctctcctgagtgagttctctgatgctgaatgaggtgtaacttctggtaaaagttcttcccacattcattacattcatagggcttctcccctgtgtgtgttctctgatgcacagtaagggttcccttctggcagaaggatttcccacactgattacattcgtaaggtttctctcctgtgtgagtcctctgatgtataataaattttgactttttacagaaggatttcccacattcactgcattcatagggcttcatttccatatgagatgtctgatgtacagtgaggtccgacatctggagaaaggctatttcagatccattccacttatagggcttttcttccatgtgattaacaaaaacagtgtccttttggaaggctttctggcattcaatatattcaaaaggtttctccaaaatacgaattttctgataaagactttcttcatttagagtataaggttccccattttgattaaattcataagcttgatctcctggatgagttttctcaagcttaatatggaggagtgatttcccacatccactacattcatcagctttcattcttgcatagcttccatcactactaatatattctgaaacagacgttaaacacttttcacatgagtcacagaggctatttttataggctatttttcttgaaggaacagggttcgtttctacatcaaaagttttaccaggaacattacctctctcttcaatcagggtctcaatgaacacagtttgccttgaaggtttattttcctcttcctggattctctctattaggtcatcagtttgccagacttcatctaaagagagacaaaattaataaacttttgtacatcttcctatatatatatgatatggaatgagattcatgatttgtacacacgcatctcattgtgagtagatgctagcttcatgaacagatgaaaataattccaagtgtactcttctcctttatgcttttgcttaaaattacacacacacaaacacacacacacacacacatccccctctaggaatggagaaagggggaagtaaactgacaaaaacacatgcacttttgatctactttatattttgttcaaaactgggaatagaagataaaatataacacagaacaatgactggtaggcgaagaatgcaggatgaatggctgacagggtagagcgataaggagtgctgttggacaaggagggtcataagatgtattcaattagggattcatttagggggaggtaaagctgtactttataccacatcacttcataccaagttgagagagattacaatttaaggcattagcactgtatactaagatttttgtggtagcattttcactagactacatccttccaaactattttgccttctttcctcattccacatagtagaataaactaaatctcctcatgtttaaaggaacagccctataaccagggcattcgccctgtaattctgtttcacttggatgaagaatcccaggaatgtatatatatatcctacaggaaatataaaatagtccacagagctataggcttatcttgtgaggatagcgatgagatcaactggaaacttcagtattctaatgatgctatgatttaatgctaaactcattctgaccatgaaattctacttgttcctatttgaacagtatatttaatagcatgaattctggtgaggtgacctagggcaagctacttagcaattctctgtagtcagtatccttcatctgccaaatggagataatggcacctacctcataaggtggttgtaggattgcagcagttaatgcagtgctcagagcagcatctggcacaaaacacatgcttgataagcttagcaattattcttcccatctttcaatctcctgaccatttgcttaagccagacccaccctgacatactaccatcacttaattctcagtgtgagtgctttcccactcctgagtagcatttagtgtacaaaccttacaaatcagatccctggccgggcgtggtagctcacgcctgtaatcccagcactttgggaggctgaggcgggcggatcacttgaggtcaggagttcgagaccagcctggccatgatggtgaaaccctgctctactaaaaatacaaaaattagccgggcgtggtggtgggcacctgtgatcccaactacttggaaggctgaggcaggagaatcgcttgaacccgggaggtggaggttgcagtgagccgagattgtgtcactgcaccccagcctgggtgacagagtgagaatctgtctcaaaaaaaaaaacaaaacaaacaaaacaaacaaacaaaatcagatcccttaccatgctcctaaaataacaattttatttttacttaccttagaagtgtctggatgaacctgactactgtacttgctatcatgcacattaagtgaaacgatatcaaccgtaacccctataacctgtgctttccctgaacccactgccaaaatatcaacagatcaaatgagaaaaaaatctgagagacaatacttttcaccacctgggatcactatatgctgccaagctaggatgacagtcatctaacaaaaatattccgttgcaggaaaagcaagctatttgttgcacaaggaggttcctaagataagtccaagtagagagttgttctggaggaagtgggtctgcactttacaccttctcatgtcacatcaagctgggagagataggtcatgatctatctcttatccttgccttatgctacgatcactgtgtgcctgatcaatgcccagcacatttcacctacagtctccacccttattgtttcactcagtttgcttgacttcctgccttcatcttctcaaaacctacctttgtaggggatttccatgcttgaaaaaaatacttctcaaatcctttctcacctcaattccatttccccttgaagttgagaatactgtctatagaatcattttaatacaaagtgactcagccttgcattggaacatcagcactccatgtaaaatgctgagttttaattacttcatgcagcgctgttctctttttttttgagacggagtcttgctctgtcacccaggctggagtgcagtggtgcgatctcagctcactgcaagctctgcctcccaggttcaagggattcttctgcctcagcctcctgagtagctgggactacaggcatgcgccaccaggcctggctaattgtttagtagagacagagtgtcaccatattggccaggctggtctcaaactcctgacctcatgatctgcccgcctcggcctcccaaagtgctgggattacaggcgtaagccaccacgcccagcccttgttctcttttcctaaccacaacctttctcctaggaaggatggtcctatttcctatttcctttgaacctctgaataaaaatcagagaagctgttcttaatctgaatcatataggtatttttccactacttgcaaaatatatggggatgtgacccaggcatgcattatttcttttttcttttttttgtagagacagggtttcactatgttacccaggctggttgcaagcaatcctcctgcctcagcttcccagggttgggattacaggtgtgagccaccacatttggcccaggcatgcatatttagaagtaactgcctgtaaattatttctgaatggatggacaagaaagttctttcacctgcctagcttctcagataatcaaagaaagaaagaaatatctctctctgttacacactacatcaagggataacatgcccctttccttacaggactatgatccaagagcaaaacagctcaagcaaaatatagacactatcgaataacagattacttaatcagagtcacttctttatcctatcacccctaggtgaaactgaagtcgagggaagggagatacagaagtcatgacaaaagtcagggaggggttgaagatttgaggtcagacttaaagaatgtgttatgtggggaaggaaagcacaccctaatgaaatgtaaagctgtagggacaatagtatcatgaagagaagacattaggagtgtgaaccaaacggagtttagtcagagttttggggaaacaacagaaaattactttttccaggtaatacaggcctaatattgttgagatccttaagggacaaggaattaaaattccctttaggaagtaaaatgtaaccaactataggcttatcttgtgaggctagcgatgatatcaactggaaactttagatgaagacatactgcaaatccagctaggactcatagcatgacagcatctagtctttgtttacattaagtcaaaggaaactgaggatatacagaggacaatgaagacatttcacactggacaaaatccagtaatccagagagatcagtaatatctgatgagaatttcagtggtttcacagggaccactatagaagaagaagagattagtatagtttagtaaataaagggaggtggaaaggtgattagtaattataatttggaataggtcatgatcaatttccaggcctgatgagaacaagagcagctctgtaactggtatcacagaaaataccagactagagcccaggctcaatggtggtagagatgtcatcctgggtgcgagcaacataaaataaaaaacaaagcctaaagacttggcactggaggcaccctttgagaaactcataatgcgaggaaatcacagtaggtagaaacagaccctttaaagacatttctggaggtggtggaagcataaaccagacttcatttgcgtatatgatacttactaagcacctgccatgacagggtatcattcaaggcattgggaacagaacagaaaataagaaacaagatgaaaacgagcatttggttaaagagggagacccaggtactgcagtcaccaaatttcaggagggctgggtctcaggaatgagcagcactgtccaatgaagcacaggtgcacatgacaagtagcaggatccactggcttaggcacaggatgggaactttggagtctaacctcaaagaaagaaaagtacaaagtagaacagggtccagaaacagtctcaggcactgcacggtaaagattaaaaaaaaaaaaccagaagttacacgaagaacacaagaatcacataagttatttttaaatgtcagacttataacacctaaaaaatccatgataatggtttctgaaaatgctagaagagcaagcaaagacccaaagtttaagagaacaacagaagtgactggaattcgattcttgggagtggcaagcacagaaaagctccataaacataagttcttacggggaaggaagaagtctttgggagtgagattcaggttcatagagcatataagcaactatttctagtcacttctaaaggttcgggaccattaaaaaatccctgggaaaaacactcccaagttaccgatctcctcactgcctccactaacacacctggatagctctgaagtaggaattctccttctactatccatggctcttctccttgctccaacttgctgataacatccggtttgataatgtgataccctgttaatgagaaatgaaagagaacttgagcccaggccggttggcttcagggtctctgtcatacagggaaaattccatttgtgtcttatcaaaatcagaacttttcacgggggagatcaagaccaaaatgccctgcctggtgcccaaaaacagattactcacattcgtcccatcaaattttaagttaaagtcataaaatttgtgagaaatcccatatattttagcaactgagaaagcaagctatcctcacccacagaaactagattgctgtagttctccagcatcacatccctgtaagttatcttctgctcaggatccagctgctgccattcctcctgggtgaagtccacagccacgtccttgaatgacactggcccctgaaatggcaccgtgattggaattgggtgacgtgaaataggcacataggtacaagatcttagcatgctcactggcaaaattaaccatgaacactgtatacctttattttatgttacagactgtcaaagggaaacaaacatatcagaaatacactgttctggggttcattcagtatacatcaaacaaaaaacaaaaaacaaaaaaacaacactgggattgcacggtgagccagaaacaatcctggctgttgggaactcttaacaccagcagggacgaatctcacccctgaggagcacaggcctggggacactcacagaaccccaggatgcactctgcttctttgcacattcttcaatttgcttctagaacattaataatgttggttctcttcttacctccctggtcactccttctcagtccctttgctggctcctcctctactccaagtcatcctgaatgttgtgggcctacggctgtcttgagtctttttctctttgctgtctgtacttgctgctttgatggtgagccctcttcctggctaatttaattaccatctatacaccaacattttccaaatttacatcatcagtccaggcctctctcctaaattccagacacatatgtcccagatggcaaactcaacatccctgaaattcaattgctgttcctgttcaaacctgctcctaccatagctactactggaaccaacccacaatatttgacacaattaccaaaataacaaacaggctgggcaacacacattctagtttttatttttactgccaagtgaccaagcctacagcagttcagaatgcagcctgtcacatgaattatcagtaatagcttggttcaggttttcctaattcccagctgggaaccccaaatttcctttcttcccatggtacacgttctaggagaaaggaacattcctgaggaggaacagacagctgacctggaaactgtcaaaaccacatctataaatgtgtatcttttgaataaagtgtcccattcacaagtactcacactagccattataactgtttcctttaatatcatcccctctaaaataaagagaataatgctacctatacataataccagtattaaatggactaatccacgaaaagcacttagcatagttttttggataaaacacatatttatcaatgaaatctactgttattgctgactttctactgtggctctgaccactttccaaattaggacagaaaattaaccataaaacacagaagtttaaacaactgaaggttatgtggttgttatttatgtaattggcaagaaagaatcataaaacagtgtctgtgtgttaagaacaaagaggctgagatgatttcaagaaaatatggtagcaggaatggtgtagaaggtgtggaaggaaaggccatgtcatgttcagagctacgtaagatgatgacaaactcctgatgttgactgaacaccttgggtttcatatgtggaatgactggaatgatccatgagtgcaagctgggttctactgactccctgagatgccgtgccactctctcccagctctagatataggcgtatccacagacaggcctggctggcctgggaaggatgagggtaatcagggctgagagtgtccagctgctgatgggacacacggtggggaaagaagtgggtcccaccccagccagatgaatccaggtgcaggactgccccagcaggtgatgagaacttcctggggagcaatagctgagcttccagaaactctgtgcacactttgttcagacgtcatccaccatgaggatcgggagagtctcgaagttcacgtatggcattgccctgccttgctgagcaataacaacttgtttatttcttaggaaagtcagcctggtttcctttattcaagtggtaggtccctgcttagtatgtccacctgatatctgtcaggatggtcactgtgcaatgggtgaaaacgggcaaaggactttcaaggactcataagaggaaaaatgtgaagaaagtcatcagctcaggaaaagtcacaaaaggaaagcaaacaaatgaaagtagatgagtaaagagaccacatatatctatgactacaataagtgtgaacacataaaatctctattttattttcgatttttttttaaatctctattttaaaccagaatccctcttacaataaaaatatgccagggacggccgggcgtggtggctcacacctgtaataccagcactttgggaggccgaggtgggcagatcacaaggtcaggaaatcgagaccatcctggctaacacagtgaaaccccgtctctactaaaaatacaaaaaattagccgggcgtggtggcaggcacctgtagtcccagctactcgggaggctgaggcaggaaaatggcgtgaacccgggaggtggagcttgcagtgagccgagatcgagccactgtactccagcctgggcaacagagcaagactccgtctgagaggaaaaaaaaaaaatatacacacacacacacacacacacacacacacacatatatatacatatgtgccagggacacgatcttgaccagaaacatacttagaaataaccaaaccatttcagtcacacttctgtcctatagatcgtatatatttgagtctttccattaagagattctaagtgatcttcctgagaaagaatatttcattctttttagaatcccattagctaggagagtcctctgtctagcatctcagctagacacccttgagtgtcactgactcaatcccctcaaacccccactgcatttgtttttcacaatgtcagtctctattaatttcagcttttcaacagatgacacacttttcaaattagaaggcttgaagttctctgtaggacaaaaccaaaactcagtccagcattgggggctcctgggtccatctgggtatttatctgcattcccatccctcagtctcttaacaggaagtccaaattctaaggaagcaaaaatctcaccagccctccaggagacttactcaggcccctaatgctggtctcctgagtgcctttacaagcctctgccactaacccgaattattccagggctggcaaatgccacctttcccttccttgaatgactgaatcacaatactttgatggtgcattcatttgttcgtttgttcgtttgttcattcattcattcattcattcgagacaggatcttgatctgttgcccaggctggggtgcagtggtgcaatcatagctcactgcagcctcatattcctgggctcaagtgatgcttctgcctcagccttccaaagtgttgggattactggtgtgagccactatgcccggctgaggatgcatttaaaatcagacttctgcttcatcatcacttcagagtttcccaggcattgaccagaacgactcccatgatctcccataattacatccatgaattacctcctccaaggagaacataagcaccttgagagaaagaagtgcctcttaaaatcatatcccaaaccccaagacaaatgatgttagtgtctaagaaaaaaagacaaaatgctagctgagcagaaggacacagagccaagcaaggagggagcttcctctgggactcctgaagccccagaacagcaggtgtctgtgtggtagactggctgctgctctaatcgctttcagctgagaaacaccagtatcatgacacaagctcccaaaagagtagtatgttacatttacattgtgagaaatgagctgggatttcagacagaaggaaaggatggtcctcacggctggctgagcatgtgtgggggtggttaggatgcagctgctctctcccaaaacccggccgtcacccctcactcttggctgacgagctatttccctgagaaaagaagcaaataggaatgctatgtctaccctcttctctaaccacctcatgggacacctccaactgtttgcatctctgtcccctctggctgactcgaggccccacagccattctcactccatgggcaacaactatttctcattctcgacagaatcaccccactattatctctcccatcaaaacaaaacaaaatgaaaaatcctttcttaacctcaactcctattcctgctactatccaatttctctttttcctttagggcaaaatttctcaaaaaaaaaaaaaaaaaaaattctcaatagaccaaattcaattcttctaccactctctcctaaacctctccaatcaggatttcccttacagatccagccacagggcctcagagagtcacatgacctcccctgagctaaatcccagcactatttctcagtcttccttgggctggactcttaacagcatttgacacagttgatcacctgtccctgaagcttctcattcccttggcttcagaaactgcacgctcctggttctccctctagcctgaccagtagcaccttcccagttcctccttctctaccagactgcacatgggagagtaccagattcgtctcccaaactccacaaacacacacacacacacacacaccagattcgtctcccaaactacacacacgcacacacaccagattcatctcccaaactccacacacacacacacaaccagattcgtctcccaaactacacgcacgcacacacaccagattcatctcccaaactccacacgcaccagattcgtctcccaaactccacacacacacacacacacacagatttatctcccaaactgcacacacacacacacacacatgagatgcgtctcccaaactacacacacacacatacacgagatgcgtctcccaaactacacacacacacacccacacgagatgtgtctcccaaactacacacacacacagagatatatctcccaaactacacacacacacacacacacacatatgagatgtgtctcccaaactacacacacacacacacacgagatgtgtctcccaaactacacacacacacacacacacacacacacacacaccgagcagatttgtgtgtcaaaatacacacacacacacccagagagatatatctcaaaatccacacacacacacacacaacagagttgtgtctcaaactctacacacacacaccccctagagtggtgtcccaaaccacacacacacacacaccagattcgtgtcccaaaacacacacacacacacacacacctgccttcttgatgctgccactcattgcatactaacacagctaacacagctcccaaactacacacacacacacacacacacacacccctacctgccttcctgatgctgccactcactgcataccaacacagcccaaattttaaacatctgaaacctaattctggccttttctcaagcctgctttacccacagtcttccccatcccagcttcaggcaacctcattttcgtagtagccactctgggagccacgcaagtgcttttcccatgggggaagcacgatatgatgaacacttcaggagaaatactcgacatgggaaatgcaatatgcctgggcttgtggaggaaagtagcagtatagaaagaaaatctctacaacagtagagaggccaaaaaataagctatttttacaacagcagggaggggataggggacaggataaaaaccatctagaatatgacatgtacaaactcaaaacaatcgcgaggtcagaaaatggacaactttagaaagaatcccatctttctcgatagggctacaggctggacgatggaacaatgaatcaataggaacaagagaaggcataggtgggggggctccaaataattattctgaacctgctgcatctatgaccttgaggggtcctttggacacactccaaagaaatgctaagcaggtggctggacagttctatgtgggaaaaccaacacagagctggtagttagaagcacaggagggtgacatcagataggtacagagtcgtgagccaagagtggacaccaacacatgaagaccaaagaaatcatcaatttcaggaagcaggcaagaagagaaagggcactcaaactgacagagcaaactgcagagtgggccaaggcaaagatgcaaatgtccactaagagcatgtgctggattattggcaaccttttccaacaaggtcaggggagtggtagggacaggaccaagaccacaggctatgggataaaatgggcatctatgccagagatttattatggtcctttctgctgtgcaacccagataaactaagagaaatatttagggaggcggcttggcatggtggctcacacctataatcccagcactttgggaggtcaaggtgggcaaatcacttggcacttgaggtcaggagttcgagaccagcttggcccaagtgcttctgaaaccccgtctctactaaaaaaatacaaaaatgagctgggtgtggtggcaggtgcctgtaatcgcagctactcgggaggctaaggcaggagaatcgcttgaatcagggatagcgccactgcactccagcctgggcaacagagtgagactccatctttaaaaaaaaaaaagaaaagaaaatatttagggagactaatttaagggtgagaaggccatttctgcaacggatagagcagtaaaaagaatctacctttgagacaacaatgttttagttactagaaatattatgggctgggcgcagtggctcatgcctgtaagctcagcactttgggaggccgaggcgggtggatcacctgagctcaggagttcgagagcagcctggccaacatggtgaaaccctgtctctactttaaaaaaaaaaaaaaaaaaaaaaaaggccgggtgtggtggcagatgcctgtaatcccagctactccagaggctgaggcaggagaatcacttgaacctgggaggtggaggttgcactgagctgagatagcgccactgcactccagcctggtgacagagcgcaatacttggtctcaaaaaaaaaaaaaaaaaaaaaaaaaaaaaaagaaaggcaagaattgcaatggttcaagggttattatttaggaaagctgttgataatgatctcagaggaatctttaaaattcatgcaaaaacaaaagtgattctgcttacggtcaatgtaagtcaaggaatggatggtatttatcattttttgtgataaatgccaagaacataagacgcttgtactctgacttcaagaactctttaaggatcacgctatctgcgcatatgaatatgataaaaaggcttggtgctgatggctactgttctgtctgaccaaatcttgtatctatttctactttcccattttaaactttgaacccttaatctcctcctaaggtgtattgtaaatcagagtagagaataaatacatgaacagaaacactcaccagggatttattcattttctgctgctcttggaaaaatctggaggactgtgaaagcggaggcagatctggggaaggaaaacccaagccatggcgttatgagcggtctggcctgccaaggcggtcatctcccgcccaaaacctacacagaaagttccaagaagtacatcttgtgggagactgtccctttaagccttcagaagggattggaaaatgatcaggagggggaccgatctgcacatttgaaactcacacatggctaccttgtgactgagtggatgagattctcatggtgaatgaatactggatcctactgaaataatctgccatcattaaatgcaagatttaaaaaggaattctggtgaccagcctggccaacatggtgaaaccccatgtctagtaaaaatacaaaaattagctgggcgtggtggcgggcgcctgtaaccccagctactcgggaggctgaggcaggagaatcgcttgaacccgggaggcggaggttgcagtgagctgggatggcaccattgcactccagcctgggcaacaaagcgaaacttgtctcaaaaacaaacaaacaaacaaacaaaaaacaaacaacaaaaaatgaattctgtaatactcatctattttcttactcttttaaataaagatcagaaaatccacaggatgccctaaataaaggaatacagtcggcataattgagtctttatttgcagaaacttcagtgtgctactcaaaaggatcttttattgaagaacttacgctcacttaactaggatacgggggacagaacactggcctgggagataaaactccagagttctactatgagcaactccacccacaaaacctcggacaagtcacccacctgctaaggcccttcccctagcaaatgaggcagcaagagatagttcctgcaggctgttcctgcactacaacgtatgattccacaagagcagacctaagggggaatcagcacttaaatgagagaacagaggtgctgacggacgtttagatacggtagcaatctggagcagagagaggaggaagggctgctggggtgaggggggagtggagacaacgtccgcagctgaggctggtgacaccccccacgcccccgtaagcctcgtcctcgccggaccctgccttcaaacccaaacacacgtcactcctgcaagcgatcgagaccttccactgtccctcactctaaggtgccctacacgcggtgacttcacccaggcccttctcgccccgggcccgcaaacccacgacttaccctcctggggctccgcagcctctgccccaccgctcccgacaggccggggcgggattgctgtcgcgggcgcgcgtctgctcgcgaggtcccttcctgtccacctcaccaaggccgttctgctccagaggggcccgggccgggcctacgggacaaatccaggcggggcgtccctcccggagcccagatccgtctccctggggctcaccgtcctgcggagccggggccgggccgtcgaggacgcacacgggccgggcccgggtcccgccgccccttcgcctccgccgtcgtcaccgcccggccggccccttgggccccagcgccgtcggctccgggggtcgtgctcggggatccccgcttgagcctccgcctggcccgcacagccccgcgcccgcttgggtgccggcccggctcttcggcgcccagccccgcaggctccgcgattctcgcccaccggaggccaaagcctgggaactagggcgagcggtgacctggggacgcacaggaagcgagggcactgcggccgcggcgcgcatgcgcgaacacgcacacagagaggggtgcacatgcgcaggaatgcaccggaagtccgcctcccgggacccgccgccggtcccaggacaaataccgtgactctatttcccatgagcctacgcgctccccaaatttaggagccatttgaaatgtctctatctggtctagcggttaagaggctctatgctaagagaattggcaacgccgaaccccagactcaaatttctccttagtttaagggaacgtcttcatggggatgtcttgactatctttaagggaacgtctagaaagtctctgcttcctgtagcatctcgtagaccatgcctgggccagtcctgccttaccggagagctcaaggcttaaaatcaatgtccatgtgcaaccgtgacaaatggaacaagagggtgcatcatgctagcttatgatcacaatgacacatttaacgaaaacttcagtaaatagagcccatggatgaaataatagaggattagcctgggacaggataccatcctcgccccaacaaggagaaaaagaattccagcttttccaaatcactttgaattagtgatagctagaaaactcagagaatatgtacagaattgaaagaagaaaaaaattagccagaactctacttcctgaagaggatgaggcaagcagaagaagaaatttgcgtcttaatggaaaacgaagcacatttagaaagccatgttacttgattccaaccctgttccttatctttgaggtattttacacctctttgaaaactgtaggtaatcgatgcaagttatgttctgtctggtggaagttggttgacttcccacaatccccactagagaaaatgcagttttgactgcatttctccatttacataatcatttcaatattcctgatctgaaaatatgtctgtttctcagattctctctctctctctctttttttttttaattttgagacagggtctcactctgctgtgcatgctggagttcagtggcgagatcttggctcactggttcaaggaattctcctgcctcagcctcccaagtaactgggattacaggtgcacaccaccaagcccgactaatttttgaatttttagtagagatgggggtttcaccatgttggccaggctggtcttaaactcctgacctcaagtgatccacccgcctcagcctcccaaagtgctgggattacaggcatgagccaccatgtccagccctcagattctcttttgaaccagttataatatctgcctgtttcctcttgaattaaataaaatctttagcatgtgctcatttttatatctgtatcagagtcatgattttacttttatgttttaaggttttccaggtctttgcagaagtccctgatggaatcacatgactgagccaggaaaacctcaggactggagtgcctcatgaactgttgaagcccaggtgaatcttttcttggctcccaggaatgagtccaaagtgccagtagaaatttgctggcttctcatttttcagtaatttccccatttaccaatcctgtgttttactttggtttgcatttgtttacattgctagcatcactgattgggactttgtttgtttttgttgtttcaaggcaaagtctcactctgccgcccaggctggagtgcaggggtacgatctcggctcactgcaacttctgcctcccaagttcaagtgattctcctgcctcaacctcctgagtagctgggactataggtgcatgccaccatgcccgactaatttttgtatttttagtagagacggggtttttccatgttggccagactggtctcgaactcctgacctcaggtggtagactcgcctcagcttcccaaagtggtgggattacaggcgtgaagcaccgcgctgggctaggaatttggttttatggtctgatcacatggtgatctctgtaatgagattaatgtttgcaaagacctaatctctgttgggtgagagacatcagagtctgatttgttattctatttctctgtctattttgagctgaaatcaattaagaatttcatgcccactgggaggagaagagctctttcatatctggaagggtgagtttttgcatttttgtgtttactcttgacccatgtctgaaattttagaattgaagctgtaagctctatttctttgtatgtctgtgtgtctgtaatttagaaaggtctttacctctgattgtgtgagtgtctaatgtttttccacctctgaatggtattatagtagatatagagtttgtttgtttgtttttgagacagggtctcactctgtcgtccaggctgaagtgcagtgtgtgcgatcacggatcactgcagcttcaacctacctgggctcaggtgttcctcccacctcagcctcccaattagctgggactgcaggtgtgtaccaccatacccaactaattttcgtattctctatagagatggggttttgccatgttgcccaggatggtctcgaacttctgggctcaagcgatctgatcacctcagcctcccaaagtgctgggattacaggcatga

SEQ ID NO: 14 - DNA, 2752 bp, Homo sapiens
gagctattttcattgcttgaagcctttgactgaatcagagctgtcactcctatgagaaaagacttaaagaataagcttgagcatttagagggcttcagttaatatggttgcttagttgctgcctggactgccaggagaagacagagagagcctctcaacaagaagctagagtaagccaactgcagtatgatttgaaaaactcagtattcccccaggaagagtaatcatgaccatataagtcacttttctgatgggagcccttgggaattgtgtggaaaccataaaaaccctgctattctctcttgagagaaaaaatcataatgctgaagaaaagctttaagacgaaactatcacagtaaatgagaaaatgatatgccaaccaacaaactcaagtcactaaaataatagttgcttagaaaaagcaagtcatcgggcaagctaaaaaattaataaaagatttcaagtagttggaactggagctctgcagggccagatccccagctgcagggcctagaggcagtggtgatactagcaatggtggtggtagtctcctgatggagcagccaggcccagatcatgctgtgctggttcaccaccgtcatcctgttggctgccttcccagggctgggaatgagtgttgctttactgggacccacatttcaatattttgccacaagtttgaaccaaaatattagtcatcttcctttaatttttgtgggccctacctttgagtggctctgtgattggtggagttctttttgacatcatgatttttttttttttttttttttttttttacttttgaaagtgtcagtgttggctaccacagtttgtctttatcttgtttattttttcaagacagctctattactgattgtcatgatgtctatctttggtacttcaatttgcattctggatacaggtggtgatgtccctatcttggctgtttgaagaacataggatctccacatatgtaggcatattacacttctgttttgccttgggtgcctttttggctccactgctagctaaactggcattgggtacgagagtgtctgtgaaaaccacgcagtctgactttcaccatcctgcactgacgctgactcagaatctctgtttggaggacctgaagttatgtgtttactgtggtcttatgctctgaacagtacttatatttttgtaggtcctatctttgtttttgctctgtttttaaagataagctcaaggtgaggaaaagcaaaagcatctgctcagacatctcaaagaactaaatatcacaatgccattttttgtctcctttttctgttcttcatttcttatgttggagctgaggtaacatatagctcctacattttctcatgtgcagccattcacgctattgtgaaataaagtgaggctactgggttgaactccatcttctgggggacctttatgtccttcaggggactggtaatgttttttgctacattttacatcctggaaccatgattgtgtcaagcaagattggcagcctgccttcatctttatatcttgtgctttttggcaagagcctggtttgtctttgtatagtaattccagtgtatggggccctgatggaaactacattttccagtggtgcttcttagattgcacagtacatgatcacacatgagaaatttgcagcattttttgtaatcagtgctgtcctagaagaagtggctacttctgtagaaattggattttttccaaagaaaataccctgatttgcctgtagttctgtatacatctgtttgggcgtattgatagccactggtgttttatttcctgggatgtatgaattagccacttcacctcttaatcaccagagaaaagtaaacagaaagagtgaggtccagatacttttgctctccaggtctgggctaaatgactatgaggaagagaaatgaagaggaagatgcagaaaaattgaatgaaatccattttgaagtgactgaaatgaatgataaaatgaaacattctaataggtacatctagagatattttgatagaggccacagctgaagtctctgaccaatccctctcaaacgttttggtgtttgagtcctccttggttaatactggcaactcccctgtgaggcacttgtcagaaaccgggataacaggaactgttagttagagaagatggattactcattgacatccttgaataatcaccacttctaatgaggccattcggaggagagcattagcagcttttcaaatgctttggggatcaaaatttctagatccaatgatagcaaaagctaaaaaattgtaaaatgttccataattcccagagtcttccataaataaccaaatggtgtcatacatgtacaataggatcttgttattaggctagtgtttggcatgtggctgattaggaaatattttatggtcttcatctctcagagcatgcaaataaggcatttgtttttgagaagctgggtattgttttcataagtcacttattgaggggtaattcttgtgtaagataaaggagagagtaagcaatagtaatcagtgcaaaccttcagatacaggtctatgaaagaggagggggcaggaagaaggactgtatagaaagtgtcttaaactgaggtatagctggtattatgtctcagcaaacctaataggaaattctagcataaaattgcctgtagaggagtcctgttatgatcagaaatggttacacaatagatgccccatgttgcctattcattggttatgagctttc

SEQ ID NO: 15 - DNA, 35912 bp, Homo sapiens
ctgtaggcatgagccaccgtgcctggccatgcccaatctttcttactgcagttggtgatacatggtttttgttttctctatacatgtattttttggtggtgtgtttaatatctgtcttttcccagactgtcgcctccgtgaaagcaggaaccttgtcagttttctctccaagttatccctccaacgcctagcacagtgcctggcaaatgtaggagctcaacagggtttgcggaattattatgtgtatgtctgaaggaaggatgttggcagtgcgcccaacgtgtgaggggaaccccactctccaaggttccagtggctttaaaggtgtcctcgagaaaatcagaggaacagggggatgcttgttttccttccttccttctctctctctctctctctctctctctctctctctctctctctctctctctctctctcttttttgctttaaagtatgctgaaaggacactttaaaccaagtctgaatggctcggcaggactggggcgcgggtgctggcaggagccggagaggcgacatctggccatgggagcatttgtttcaaagttcaaggccgttcgctcagggtcaaggttagtccggcgggccgttcggagaccagccccagcgtgccaggaccgtttccggggcctggccggggcgttgccgcggggtcggggaccagcacgagtgctgagtcacgccccgcccgggagcgcctcgggtcagtaactcgggaagacgaccaagcgggagcgggagcgggagcgggagccggagcgagagcgcgcgggcgcggccgacaggtgagatcgcgccgccaggcgggctctcgagaccccgggcgccccgggcgggaccgggacccggaagaggggcgagcggattagaggcctggctcacgccgcgtctggcgtggggaggtcggtgcgcgcagttgtggcgctgcgaggagagggatactcgactcaggcccgcccctctctgtctcccccaaaaaacgcaacagggagatgtgctcctggccgagggcaaagaaaactccaccctcctggtttggcccctaaatccctgctaagttttcctaaggaagatgggcttaggccgggaagggcgaaccggggaagagggaacacggggcgggtgtaacccggatcttgcgaggaccgtccgagggtccgctgggtagaagcggccggtccggacagaagcaggtgtgagaggaaagggagaaacctcagtctctaagaggaaagaaactggagtcaacccagtgcccataggctcgggggagctggggggtgcagcactaggaagtctgcttctcccttcccgaagccctgggtgctgcagggacaaagaccagcggtgagtaaactaactctgatgggacgcgtgcagtccacctggaactgaattagtggcctatattggggctctccttccaacaccacctgatcaacacaccctacctttccctacaaggagagtctttttgaccctggaatttaaggtgaggatggggagtggtgaggtctcttgggggctgatgatcctgtaggaggacaggcatagggcagagagtcagatatagtttgggatgggacttgcaggtttctggactgtgcacctgtgttcaaaagcctgtatcaggttccagtgtgcgtgcatgcacctgccagagagccccgggatctcagatcacacctgccctcaccccagcacctagagaggagttctccaaggagcacagtgtgtcaccaagaagagggcactgagccccagccagggtgggctgggcaggcttagcactacctagcccagaagtgatgggctgggcaggccggtggactccagggccagcctgacttttgtctggtggccaaatgaagccagcgtccaggtacaggtggtgggcagaccatggggaccacaaaactggctctgaggaggatggacaaattgcttggcctaggttttctgtgcgggagtgaatatgacatccagatgaacctgtctgccccagagctgccctcccctggggataaaaggaggctgcctcccttagactttgagtcccttttcagaaactggtcttttgggggttctgttcttcaagtagtccctgaggggctggccatggagtgtcccaggaagggaggccgcccaaccgtctccatcctgctgtgtcccgcaggtggaggaaacctccatggtgctgtgagtcgtgctgtagtggccttcttatccgggacggccactctgggaatgtggctctccagaggctgatgttgaaacctaccctttgtgtgagccatgacgactcaaaaagcatcgtgttttatttgtaatatttgtgaagcaatactggagcaactctgggatgacattcttgctttgatcagagcccacacggttcctgctgtgtgtcttctgaggcacaacctctgaacagctttggcataaatgtaacttcctggtttttcagtagtcctatgggctgcttattgtggaataatacccttgagatcagggtggatgctcttggcagagaaaacaggattgactgagcaaatttttgtgtaaatcagattgtgtgtgtgtgtgtctgtgtgtatgtgtgttgtggcagggagcaaaggtaaagttactgaggggttcctggacaatcagggtttgttccgctctcttaggccttcttttaagctaacattcttgaacctagacagacatagttaagattctctgtgattcccactggggctttggtgttcagttcaaaatcagatggtggatttagcagttcctcaaaaagttaaacttcaagttaccatatgacccagcaattccatacctaaatatatactaaagaggactgaagactggttcacacaaaaacctgtacacaaatgttcatagtggcgttattcacatagtcaaaaggtggaaacaacccaagtgcccgtcagctgatgagtggataaacaaaatgtggtctattcatacaccagtaatggactgtttttcagccaggaaaaggaatgaagcactgataacatgctacaactcggatgaaccttgaaaacatgatgatcagtggaagacgtcgcaaacaaaaagccacatagtgtataattccatctacatgaattgtctagaacagacaaatctatagagacagaaagaacattagtagctacccagggctagggtaggtggggtacaggatttattttgggggtgatggaagtgttctggaattagatagttgtgatggttgcacaacctggtgaatacactaaaacccactgaacttacatctttttttgaaatttaaattaaaaaaaatttttttttgagacagagtcttgctctggcgcccaggctagagtgcagtggcatgatcatgcctcactgcaacctcgacctcctaggctcaagcgatcctcccacctcagcctcctgatatcagggaccacaggcatgtgccaccatgcctggctaatttttgtattttttgtagagatggggtttcaccatattgcccaggctggtctggaactccggagctcaagcaatctgcctgcattggcctcccaaagtgttgggattagaggtgtgagtcagcctacatctcattttttttttttaaaagatggggtctcatctaggctggagtgcagtggtgcaatcatagctcactgtgaacttacatcttaagtggtaaattgtatatgtgaattctattttgattaaaaaattagatggtaagcggtctgtcctattattaaagacattatttctgcaaaaatgacatatgcttgtttgaaaaaaattcaaacaatacaaaagcttaaggaagaaaatgaaaacattatctatgaccactattagcactttggttcagacagcaggtttgatgtgttgagaattgaacttgggcaagttgttgaacttttttccaaaataaggagaaaaaactcataccttaaatcgaagatatgggcaaaagtgcaacagatgctaactgctgtaatcattacctgtatatgtgtatacataccgaggtggatgtgtcttattggccataaatgggattagatctttcatgtggttctgtggcctgactttttgggactgggcaaactaatctgcaacatatattttatatatatatatataaaacgtggctgctgtgtattcattgctactctgtgccaggcaccatgctaaaatgctttacgtaaatgatctcattgaatcttttctacagctcgaaatcacagtggcttacccctgtaattccagtgcttcgggaggctaaggcaggaggatcccttgaggggctaggagttcaagatcagcctaggcaacatagtgagaccctcatctctacaaaaaaaaaaaaaaaaattagccagctcaggagttcaaggttataatgagttatgatcatgccactgcattctggcctgggtgatagagcaagaccctgtccctaagaaaattaaaaataagtaaataaataaataaatattgcctgactttttcttttcttttttttacttttgagacagggtctcacattgttgcccaggccgaagtgcagtggtatgaagcactgatccatgctacaacttggatgaaccttgaaaacatgttttgtgtaaatcagattgtgtatgtgtgtctttgtgtgtgtgtgttgtgggagggagcaaaggtaaagttactcactgcagcctcaaactcctgggctcaagcagtcctcctgcctttgcctcctgaagtgctaggattataggcaggagccaccacacccagcccttgcctgactttttcatggacagactttttgtataaaaacgtcattcacaggctgggcacagtggctcgcacctataatcccagcactttgggaggtcgaggcaggccgatcacttgaggtcaggagttcgagaccagcctggccgacacggcgaaaccctgactctactaaaaatacaaaaaacaattagccgggcatgatggcacatgcctgtagttccagctacctgggaggctgaggcaggagaattgcttgaactcaggaggcagatgttgcagtcagtgagctgaaattgagccactgtactccagcctgtgcaatagagtgagactccatctcaaaaacaaaacaaaacatcactcaccctttaaaaacaactggctacacagtactgcattgtatgggtttataatattttatcctgtagcctctcattggtggcagtttccattgattgatggagtgtcacacaggtggaggtttgcacagcactactgctatgttagaacatacaactgggcatccactaattccatacgtgcattttcatctcctacagggtgtgtggctggaaatgcagctccatggcttaagcccttgctttaggtgtctggccaagtagatcatggccaagcagaggggagttcactgttttctggggccaggcaagaaccgacactggcagagccaaagagagtcggcatgtccaagagtattgggcaaggggctgccaaagaggcagggtgaaatctgctggagagtcactggcctccctattccacaagtaagcgtggcaggggtcagtagaggagagagaagagagagagagcagattgcaggagaggcctcaggcagcctgaagaggaaaagtgcctcccctccctggccctgctctggtctgggtgtcccctcaggccccaggcccttcacagggaaccccagataagcaatttgccttccttgggtgaggcaagagtttgccctttcggggaagcaggttgatgatactaggggcctgggggtcaagggcttggctcctttggtcaactcattgcccctgaggtccactctggggtcactagactttctttccctggaggaaaccccatgaagggcccggagcaggcttgtatgtccacctgattgtcaaagctgccctggcatggcaggctgtctgtctgtcggcccctgtcacctgtcctctaagcctctccaccttctgccacaggtgccctgaactctacctgcctcctcccttcctgccactgggcctctggcccaagttgtttcctctgctaggaaggccccctgatctcagctctttttcagggctctaggctgtcctttttgagtgtccctgggtgctccagtgtgacctgacgcacagtggactcccctgtccctatccccggccagctgcgtagcccctctcaggggccatgcccagctaacttggaagtggggctttctgggtgttttcttgacctcatccctggctgacagccccaagggtaagacccagcacagagggttgcacgctgccaggggctggtgaaacacacgccacccacggcctgcctcatcactgcctacattctcaggccctgcgcagctcctggtgtgcactgctacctctggctgggcctgtgggccctcctgggtcctggtccctaggagacattcccttctggcccagttggcagattcagcctgaggtacgcttgggattagctctagacaacccttctgagggcttagaggagccagggtggccctgcctgccggggggttgtcttgggtcctaatctctacgagggctcagcctcctcatctgtgaaatgggtatgttcaagcctcaatgctttggggaccatttgacccacgagaaacaactttaaattccctccaatccattgtgtcagtgccctccgtccgctctactgtccgcccccaggggagaagttaggcagtgggcatttgaacaccaatgggaacagtgcccggagttctaaccaaaagctgccccataagtgtgggatgatttggggaccgtcttggggaaccaccaccatgtcttggaaaccagtgtgtacgaggacagctcaggatattatagctggttgggccttatagtcccctcccattatagggggtaaattgaggcctagagagggaaggggttgtgccccagacccgcaaagatgatcagggcagtgcagtggccttccagcggcctgagggtcccagatgagctggaacacacttccttatgaggctgttcagtggcttgatgtctatccttcaaggttgacctcagagtctacttcctccttcgctgacacccgctccagtcccccttcctgaagcccacagcagctgttgagcctctggggctgctttctgtatagtgtgagttttgtttctttttctcagcatctccccccagcagcctggcttatttctgcctctctttagggctcagcacaggccaggaggagggttgattgcttgtcacctctcagggtctcagctgcagtcaagagtgcccctcaatgggctgtgcggctcctcccacaccagcagccctctgcctgcctgaggcccacactgcaagcatcctaatttggggttctgctgggctggaggcaaggcctctggtgcagccccaggccagcccctgggccctcctctgtctggggcagactctgggatgcacaggtaaccctgtttaccagccttccaggctggcttggggagcccaggcaactttgctgctgtagggcccaaggctgttgagttggataaaaggcaactttatacaaatataaaaatataaatttatttaatgtgtgtatacacaggagccttcagaaggaagacccgacccccaaaagaggtacagaagcttatataccatcttgaggtcatacaaagaaatggggactgggtgcagtggttcatgcctgtaatcccagcactttgggaggttgaggtgggaggatcacttgagcccaggagtttgagaccagcctgggcaacaaaaggagacccccatctctaccaatatttattatttttattgttttatttttttgagatggggtctcactctgtggcccaggctggtgtgcagtggcatagttacggctcactgcagccttgacctccctggctcaagtgatcctcccacctcggcctcccaattagcggggcctataggtgcccatcaccacgcctggcttttttttttttttttttttttttttttttttttgtagagacagagtctctctatgttacccaggctggtctggaactcctgggctcaaaagatcctccttcctcagcctcccaaagtgctgggattacaggcgtgagctgctacacccagccccatctctacaagtaattaaaaaattagccaggcattgtagcatatggttgtggcccctccttcctactccatgatcacagtcttagttcacaccacatttgtcttagtctgttttctgctgctacagcagaatactacagactaggtaattataatgaacagaaatgtattggctcatggttctggaggctgggaagtccaagatcaagggcccagtgtctggtgagggccttcatgctgagtcatcccatggtggaaggcaaaagagagagcgagagagaggaagagcttgaacttgcagcctcaaagcccttttataattggtattaatccattcatgagggtggagaccgtatgacccaaacacctccgattaggccccacctcttaacactgttcctttttgggagacatattcaaaccctagaagcagaattttgcaggattcttgtcgtaacctgctaattgacctccttagacctggaccttaagttggtgacctgtgagctgggctgaatctggttgcggtgtttgtttagtgcagtgcttaaagaatgttttttgttgttcctttagatgtggcctatgcttgctggttccccacaggtgtgcccactgtttcttgttattgcaccttttcccagcttctcacatcattgacattgcccacctggttctttgactttgtaaggtctgcccttataagggcagggaccatatctgcctgtctgaccacaggatacacaacacagagcatgtcaaaaagcaggagttcaattcatatatgttgttgagtgaacattattcccctcttcaaaagtcttttttttcctcctgccccactgcaatctctcccaaaagtctttgatggaatatatcaagtaaaaaacaaatgtgcagaacactttgtttaatgggtgcaaaaaataatcgtgattatagttgcataaactatctctggaaggagtcatccaaacttgttacgtaacagtggatgcctctggagaagggaacttggtgtttggggaatgggctggaagtgggatacccccttgttccttctgaatttaattcaaattttataaaattggagtttcattaatcaaagatttacctcatctaaaaaggtcaattcatgatcgaggcctctctcactgtgggtcctcccagccctcccagcctccctgactctgatatgctctcctctttcttcccagcagtgcctgatttgagatggggtcccaggtctcggtggaatcgggagctctgcacgtggtgattgtgggtgggggctttggcgggatcgcagcagccagccagctgcaggccctgaacgtccccttcatgctggtggacatgaaggactccttccaccacaatgtggctgctctccgagcctccgtggagacaggtaatgtgctcccgtctggggctgtctctgtgaggggggtcttgtctctgctctggggcttgattttagggctgggggtggttttctccatttagggccaagtgcctgcattccactgtcagacaagttctggagaagctcaaggtctttggtcttaagtagccaccacaatgagaccctagaagtaaaagcttgagcttttctgacggtctgaggcccagattggcattttaggaagtaggggtaccccaggcatacctaatggcccgacgctttggtcaagggcacccctgttggtttgcagctcgtgaaaggttctgagtcactctggcttcccgtgggcagcctggctctgccctatgacctcttctgtgtcccttccccagggttcgccaaaaagacattcatttcttactcggtgactttcaaggacaacttccggcaggggctagtagtggggatagacctgaagaaccagatggtgctgctgcagggtggcgaggtgagtgagggccagcccggctgccagctggctcaagggccctctgcagggcctgggcgggatcctccagggtcaagagagagctaggctgggggcggtggctcacacctgtaatctcagcactgtgggaggccaaggcgggcggatcacctgaggtcaggagtttgagaccagcctgcccaacatggcaaaaccctgtctctactgaaaatacaaaaattagctgggtgtggtggtgggcgcatgtaatctcagctactcaggaggctggagaattgcttgaattcggaggtggaagttccagtaagctgagattgcaccactgcactccagtctgggtgacagacagagactccatctcaaaaaataaaaataaaaaaaagagaatgctgtctgtgagccccaagccctgcctggtgctgggcagatagcggattcctcataaacaaaggcttgaccacagcaaccacaagaatatggtggcagatatttcttgtgtaattcctgcatgccaggccctgtttgtagcctttacgtaagtctcatgaatgtttaccgtgcctctatggcgaaggtggtataacttcattttacagagaagctaaagggttaaatggcttgcttaagatcccacagctggtaagagactgaactaggatttgaacccatgcaattttagcccagagcccatgctctaaaagccagcgtcccagacaactcccaggcctggccagccctcggctctgtctagaacaaaaaggcacacgcatggtcccacatcccccggatcgggacgtcactggggcagaggtttcccttcactcatttgtgtgttcccccacctcacatgtgcatcatggagcctggaacacacctgccatgacttcagctccatcgataagctgccaccagctctggatgagtgtcatgtccagcccagccccatttggtgtttgaagctaagggggcgttgacaaaaggaaacacaattcctttccttgatgagttgtgatttcgtgtgacccagcccttcttgaattaatggggccagatagtttcctggttggaaagattactgagtgtcccctggtcctgcagtctccagccatgcgtttcagagccctggaagattccatgagggcatcttggaggttcaggggaaagtaggggctgagtggagtccaggccctccagcccctcccattggagcagctctgtttttgtcaactttatatatttaggctccaaacaagatttccttttctttgtttacaatttttttaattaaaaaaaaatttttttaattgtttttgagatggagtttcgctcttgttgcccaggctggagtgcaatggcatggtctcgggtcaccacaacctctgcctcccaggttcaagcgatcctcctgccccagcctcctgagtagttgggattacaggcgcatggcaccacgcccagctaatttttgtatttttagtagagatgggattttgccatgttgatcaggttggtttcaaactcctgacctcaggtgatccgcccgccttggtctcccaaagtgctgggattacaggtgtgagccactgtgcccggcctaaaattttttttatttttaatttaaaaaaattaaattattttttaataaaatatttaataaaaattaaattattttattatttatttttaatttaaaaattaaattaatatggggtcttggtatgttgctcagtgcagtggctgttcacagatgtgatgccactactgatcagtctttctttctttccctttcttttcttcctggcggaggcaggaggagggttcttctaaaacacccgggaggttctgagctaactcccgtgggcagtgtcctatcctgcagccctgcctcctgcttccaggcacccctcccactgccatgctgggtggctccagttgcccccacattctccacgcggaggtaaactctacttccttaggtctttccccaggttctagtgccatcctttgggctaaccagtgtggtggtttcaccccctcccatgggggctgcctcgggtgcctagaggggcctctttgcctggtttgtcccggctggcaggccgggagtaggatgcagaggcctaggcctgccctgccctgccctaccctcatctttttttttttttttttttttttttttttggtttctctcaggccctgcccttctctcatcttatcctggccacgggcagcactgggcccttcccgggcaagtttaatgaggtttccagccagcaggccgctatccaggcctatgaggacatggtgaggcaggtgagctgtgcactgaaggcatggggcagtgtgggcagatggaaggacagccttggggatgcctaggcctgcagctgggaggccacggggttactcagagctgctggctgtagccatagagttggagagtcactaggaagagactttcctgggaagagaccttgaacttgctgctggagccaggatgtgagcaccctaaacctgctcatgttgcccttggtatgtctctgactttcctctcctggggcttttcacgggtcccttccactcctgttttcataaggctctgttttgtagagcaggcttagatccacaatcttccacagcaattctgcgaggtgggtgggaggaagcacgtttggactcaaaatgtggaaagggttctctgccctcctttggcccagggagccacaccacaggctgaaccagcagacagaggtggatgtgtaggtgtgtttcatatgtccctgtttcacatgtcctcttctccaggtccagcgctcacggttcatcgtggtggtgggaggaggctcggctggagtggagatggcagcagagattaaaacagaatatcctgagaaagaggtgagccaggctgccttgccttggagctctaagtggttggcttttttctgcattatcttaggaacatcaggaatttgctcagggcagagaagtctggagctctattcacataaactgggagtgtgtatttctgttttgtgccaaggtgtgattctataggggatttttcctgcagagctgggatcctgctgcacctgaccttacggagctgctcagggtgtgtcctttctcaaggaaaggtcctgccctctgctccaacttggaggatcaagcccaggggcaataccttgcaaaagcggaacttctgtgtcaccttcagaattcaggcctttgtgatacaaatgtatatttgattacctcttgctggcaaccagtatttgattacctcttgctggcaaccagcttggacaaagacaccttcagttgttgctttggtctctgcctgatatggtagcccctgctctgagcagccccatggtggtggggagcctgcagcagagccctttctgcccacgctgggcaatgactgaacagcactgccttctgcccatgggtgggaacggggaggggacatcagcctgccctgttgctttctcatgctcaaaagacagagatcctaccgggcaacctagcgagaaagaggaaatcctggcaccctgtccaggcttggcaagggctgagtgagaaacgtccttacaggtcctctaggcgagagcttgcttgcggttgaagccagatcggcttctgagagccatgtggggcctctgaatggatctttcttcctcagggaaaggcaggttggttttgaaaagaaaaatcaatagaggataacttaattatatggctgttctctgacaaattgttggaaattatgatgagtgattgatctagttacattcattcattttgatgtatgagggttctatagggaaaaaccaaactgtttttctccctactcactccacacttctgggataagatgtgtgggtttttcccccactgaccaattctctgacaccagctgggtgtcctacggttcaattcaattctgacactacctggcgttagcgcagaccccacaggtcaagggctcagtcccacgatcctgccccgacttcaaacaccagttgcaagtccataggtccccagcttacccacgcttctgtcccacttggctacaagatagagattctcatgactctctccttgggttaaataatttgctagagcagctgatggaagccagggagacagtttacttgctgttgctgatttatgacgaaggatgttttaaaggataaaaatgaacattcagatgaaggggcacatagggcgtggtctagaagggtcctgagcacaggggcttctgtccccatggagttggggtgcatcactgtcctggcatgtggacatgttcaccaacctggaagctctctgaaccctgtactttagggatttttatggaggcttcatcaggtaggcaaggttgattatgacctcaatctccagccccctctcgtcactggagctgaaagttccagacttctaagctggcttggtctctctggtgaccagcgatcatccaggagcccatcaggagtagcttcattagaacaaaagatgctcccatcacccgggaacatccaaggagttaggagctctatgtcagaccctcccatcactcaggacattacaaagatctcaggagctctgtatcaagaaccggcaatgaggaccaaatattagaacaaatgattcttagtaccccaatttacaagggttttaagagctctgcatcaggaactgggggcagagaccaatatatacttttcttcttatttcacaggggtcagaccagtctgaagtagtaaaaaagttcaagtaactcagtaaaatatccacatgtttaggatttgtagacagtaagggtagtagcagccaccctttattaaggacttaatatgtgctgagttacatgctttgtacgtatttttttgctcatcattacaaaattcctatgagtggggctattgtgcccatgttaatgagcctttgggaggtgtccaagtgagtatcagagatgggatttcaacccaggcaatttgataccaaagcccaggctttgaacatgattgcaacatgaggtgcccgggacgcttccctgtgttgtcccagacagcaagtagacatgcctggaagcactaattttaaacaagctttaatgttgacatcagtctgattgactgttggaatgcccatggcttgtataattataagtgcccaaggatgcttgaagataattttccaggtggccctaggtgaggtgtaggttgtgacatgttggcatattggtagtcctctggcctgggtgtggcaggagggtactgaaagagtcctagtctagaacatgtgggcttaagcccagctcaccactaattggtcctggcattggacagattacttctctggagcttcagtttcctcatctgtaacctggaggtatgagtggaggtggacgttcgtgcaatgattgtgtttgaagacttgggggctccttctcaggccctgtggtcgttttgtcctcaggtcactctcattcactcccaagtggccctggctgacaaggagctcctgccctccgtccggcaggaagtgaaggagatcctcctccggaagggcgtgcagctgctgctgagtacgtgcaccctcacctccctccctgccctgccctggcctggtgagatgtggcttggaggcttggtgactgcttccagcaggagggtggctatggtccaccccaggctctctcttttccactgtgtcctggggtggagcatgaagcgctcagaagaggccgtgaacatcaaagcccatctgagccttgtccagctggaagttgtgcccgtccctgggcagggaagagggcctggtacttacgggatttccatgtcctggttattgctttggatgcagtgcagatggtgggatgcctgtctgctgaatgatttttcttgagtgcatctgaaggatttgccccaaataggatgtctctgtggttgagggaataggtttattggtttatgttttgagagtggtgaggagtgtggccttcttgtagagcaggggacgagacccacccagcaaatgctggaaagtgaggttctcttccagcgctgtggcccctacacttcactgcatggggccccagccccctcactgtttgcgggagggtgaggcacctgtcctgtgaagggcccgcatggctgcctcagcctccttttggtaactggctgtggagtgctgccgtcactgtcactttaggcagtgagtgtagcgagctggcttctctttctctggctttcccctttgtcgtggtgcacttggagcgctcgtcctgcctagttaggatggcacggctggcactcataagaggcgcgtctgagatcttccattaaacagcttttctgagaacttcttgggaaacagcctcgcttccctccaggggcttcttggaacttttctccagagggacccctcggggccagatgtccagatcagctttgtggggcatagagtggactgagggaggggcatggtgggaagacagggtgcagccattgcccagttgggccccagaggtccaggccctccccagggttagccttggcctggggtccaggcttgatggggtccctgtccccaccagcctcctggtcatgaacccccttctaggtgagcgggtgagcaatctggaggagctgcctctcaatgagtatcgagagtacatcaaagtgcagacggacaaaggcacagaggtggccaccaacctggtgattctctgcaccggcatcaagatcaacagctccgcctaccgcaaagcgtttggtgagcaggtgcccagccgggcttcccctgtgcctccttgctctccagtaccctctgaatgccctgcagtgcttgcccccaggagtccacaccttgctgccttccccctttcttcccaacagctcagactttaaattcagtgagggtccacccttgctgagctctcctcagctgtgaccatggctcggccccaggtggccaaggtgaccagaatcttctgaaattagggccgccccctagtggtaagagatgggaacaggcgtcagagagatgacaaaggttggtggtgtttctttccccctcacctgaggacagaggaaattcagggtcaggccttcctctcttggcaggcgtgctgccgcccccaaacccagatcaaaacatttggtctcttgagcttggattgactggggagtggggttggtaacatggcctcgtttcttaaagctcagtatttgcgtatttagctggctggaggtggcagaggtggactgatgtgtgtttaagcctccatttgtgagcaggagactcagtggccaggcctggtggttgctttgtgtcctcaattccctgtcatttactcccaaatgcccttccctgacaaggagctcctgccttgtgtccagcaggaagtaatgatccaatcccaggaaaaggaagccagtccaggctgtgtgtagcagtgggattgagggcttataatggacagagatcccagaatttaataccaaattgtcctaatgttgtattttcaaatacaagtttttaaaagtccctttaaaaaagcagtttgccatttattaaagctctgcatttatttttaatgcttcagttttgttttttatttttattttttgagacagagtcttgctctgtcatccaggctggagtgcagtggcgtgatcttggctcactgcaacctccacctcctgggttcaagcgactcttgtgcctcagcctcccgaatagctgggattacggctgtatgccactaagcccggctaatttttctatttttagtagagatgggtttcaccatattggtcagactggtcttgagctcctggcctcaagtgatctggccgcctcggcctcccaaagagttgggattacaggcatgagccaccacacctggcctgcatttatttttaaaatctcacttacattcaaaagtcaattcaagactcagctgatcattgtaacttgttgagagttatgtacatttctaaaaggaggcttgttggtattttgacccatttccactctggcatcagcaaccttgcctctgcaggaagagttgtgaggtagagacttcaggggggaatacattaggtgggagggtggcctctagagcaggcacctccagggggtggtcatgcctcaggagggtgacctgaccagcacctattgaccagtgtctagagctcgccctctcctcctcctggtggccacttaacacagcagctcagtgtcttggtttcggtgtcatttcttctggcagagagcagactagccagcagtggtgctctgagagtgaacgagcacctccaggtggagggccacagcaacgtctacgccattggtgactgtgccgacgtgaggacgcccaagatggcctatcttgccggcctccacgccaacatcgccgtggccaacatcgtcaactctgtgaagcagcggcctctccaggcctacaagccgggtaagagaggccccatgtgctttgcagttttaatagagtttggggttaaacatggggaagcctttttgggctatcccatacctggccactagaacaaactctccaagctggtgatggaaacatccccttagagctctttaaaaataggctgggcgcggtggctcacacctgtaaccccagcactttgggaggccgaggcgggcagatcacctgaggtcgggagttcgagaccagcctgaccaacatggagaaaccccgtctctactaaaaatacaaaattagccaggtgtggtggtgcatgcctgtaatcccagctactcgggaggttgaggcaggagaatggcttgaacccaggaggtggaggttgcagcgagccaagatcacaccattgcactccagcctgggcaacaagagcaaaactctgtctcaaaaaaacaaacaaaaaaaaatcagggtctcacccaccttcctaaagcgatttcacatttccggccctgagtctgaaggcctcgggaaggatcggcactctgggaggtgcagccccaggcggttcagtgaggttctggttgtttctgtgtctctgcttgcaggtgcactgacgttcctcctgtccatggggagaaatgacggtgtgggccaaatcagtggcttctatgtgggccggctcatggttcggctgaccaagagccgggacctgttcgtctctacgagctggaaaaccatgaggcagtctccaccttgatggagaggccaggcgggagaactaccgcagcaggtgggcgtacggactgcttggcgcatggcacccgcctggcaagtgctagaactaatgctattcttctggaataagatgccaatgatgtggtggctagaaatgcaacttgtataaaacaaaaatgggagagagagaggtattaaacaaataccccccttagaggatactttctgggtttggaaggtgtgcttgctgtggtactgggtgagcggctcatgtgtgctggctgcatggtgctggggaggccacagccagcccttcctctgcacctgcctcctctgggatgtgcatgtgtgtgtacgtgcttgtggtcatgacgcgtgccatttagagctctcagagcagggcagattgctgggctctggtggccagtgtctgtctgtgagggcaggaaggagagctgcacattgagaacaaaggagggacctgaggtggagagaggcccagcaccccaaatctctgccatcacacggtcggggagcccatacattctgcaacaaccagggacttcacaggagccttgttttcaatttgctaacaggtgcataatccctgtgctccttaagcctcatggccttcctacatttccactttatttgtttgtttgtttatttatttttgagacagtctcgccctgtcacccaggctggagtgcagtggcacgatctcagctcactgcaacctacgccttctgggttcacgtgattctcttgccttagcctcccaagtagctgggactacaggcacgtgccaccatgcctggctaatttttgtattttttaaatagagacggggtttcactgtgttggccaggctggtctcgaacacctgacctcaggtgatccattcgtcttggcctctcgaagtgctgggattccaggcgtgagccactgcggccagcacatttccacttttagatcctactccataccacaggtttcatttaagaagaaagagctagataaatgtgctcttctggttaccccaccctgacagagtgcatttttacacggctagcaggggttgagactgcagcctggcctgccagccattggaggtgtttaaggaagggcagataatgtgactctttgcggggtgccatctgcttacccattagcgagcagagggggtttctgcgggtgacccccagcatatttctaggttacttatgggcagatttgtaagtgacaaaactccagctgatgctgggaatggggagagggcccttgagggactttgtggttttgtgcttctggtttcctggccaaccccagggtcacttgtctggaggcccagctgggcactaatgtctgccaccgactatgttacagtgtataaatgattcctctatttgggagagatcttccaatccagaggagcccctcttggactgcctgggttaaatctgcatagcagaagtggttgatgagttcatctgaagaaattcaggccccacctccccaccctgcccctccctgctcccttttgatggtggcctctgggtactcgggcagagtccttgggacaccagcctctctggggttctcaggccatcccgttggggctgtcgcccaggcctaagtgagtcgtgtgcctctattggaggatggctgttcccctggtggttgcatccaagtatctgtctttctttatggaccacgaagggaagcccaccttcctggaggcaggaccttcggcctaagaaacacaggccctggtgctatctgacctggggtccagcgaggtgggaatcccagtgtgtgagcgacaggccttcttctattgacttacaatattctagaaggacctacgtgtggggacacagttttccaaactgaggaaaatgttgcaataaaagaatatgttgtaagaaagacactggatcttttatttttttcctttcattttctttttcttaaaaaaacaaaatgaaaccaaaaaaaagcctgaatcaaaacctttttaggagtagttacagatattatagggatgggggcggggggcactaaaacaaaagagaaaagcaccagtgagatgtctttcccattttcttctctccgccacggaacacgcacaccaacagagcccaggccactttttgccctcttcccttggaaaaaggaggaacagaagatttaagaattttgaaaggatttttttcttgtgtgaatgtgtgtaaaagtcaatgctataaatctaaaacgaggtctgtttttttaaaaaagttctaaaacaacaggaggaaaacacatggaaagaaacccctcgcggagacctgcttccttacagatggaggctcttttggaggagagtgtgaagggcagagggctccctgcgccggcaggacctgcccggccaccctccactcccctgccatcacccctcctctctccttttaaaaagcaaaaccccactcttgggactcgggtcgtcctccgatccctgctggaaagtgcggcggctacttggcgtcgagcttggccatctcctgcacgtagatgccgatgctctcgctgtcgaagagcaggaagtacacgttcttcagcgaggacgcgctcgagtcatcaaagtgggctgagatggctttgagggtcacctgggccgcagtctgtttgggaaagcagtttctgtgccaaagcaaaagaagagccgatgtcattttggtccctgggacccatgggagcatgaagtgcctttgtttttactgggtggggccttgctgtgtgcagggctagtccatgcatgatctcctttgaccctagccaaagggacagcctgggggtggcaggtggggcatgttgcccccactttataggtgtcacactgactcggagaggcacaatgatttaatttgattaaattaatttatttgttttgggatggagtctctctctgttgcccaggctggagtgcagtggcgcgatctcagctcactgcaacctccacctcccgggttcaagcgattctcctgcctcagcatcccaagcagctgggactacaagtgcgcaccatcatgcctggctaatttttgtatttttagtagagacggggtttcaccatgttggctaggctggtcttgaactcctgacctcaggtgatccgcctgcctcggcctcccaaagtgctgggattacaggtgtgagccaccgtgccctgccaagcacaatgattttagtcaaggtcacagggctggccaagtgaagagtgccctgtattttattttttattatactttttttaaattagtttttttttcagaggcaaagtcttgctccatcactcaggctagagtgcagtggtgtgatcatagctcactgcagcttcaaacctctgggctcaagctatctgtcttctgcctcagcctcctcagtagctgggactaaaggcgtgtgcctataaaaaaatttttttttttaaattttttgtagagatgggtcttgttatgttgcccaggctggtctcgaactcctggcctcaaatgatcctcctgcctcagcctcctaaagcttttggatttacaggcgtgagccaccgtgccagctccctatatttgattctatgtcacctgaccaagtcaagcttggctttaaaaatgctagccattcagcattaaaaatacctggtcttcaaacaagcaaacagaagttttattagctccctccaaactggtttatatactaacccaattgcttagtaaagggcaaaaatgtatgctccaaacctgtcttcgtaagtccttttttatgcacttaatatttcataggcacaggcccatgtaatttcagcattgtgactccgggcatggcggggttaatgaaagtttgttaaaggccccaggttccagggagctactgatagtgccatccaccaggctgggccacagcaccagcttccagggacacagccagaatggtcgttaggggtcagccacagagacccctggagcaggtccaggaggggcctgttaataggaattcttcccaatcgcatgtattccagcacagaacagcactgccgtggttccaccgacgaaagaatgcatctcacagcatctctgggcctggaatgctgagactcaatgctgcttgcctaggttgatgtgtgattacagcaggaacctaggtctcattattttcctcttgggcttcccaggacacagctataaaccatagctatattataaaggacagctctcaaggtgagagggtgttcaaaattaaagcaatagattggctaggggcatgaagggaaaggatatgttttatgtgacagcagatatcctcattatgtatctgaaacaatgcccagctgggatctgtgacaatccagtcattgcccagtctccttttcagcaatcactcggggacagattttcacttctctgggtgtattcatcaaagcctcgaactcctggctctgcagtctcccagagcagcaacggaattctctggggattctggagccagaggtcggagatggggggcctgagattctgcattctgacatcggtcactgctgcctatggaccacactttgagtagcaaggccttcgagcctggcgttttctgatcatgtgtcctggacatggacagctggtgggaatatggactttgaacctggaaggctctcaaaaaataacacaccagctggcctctgcctcccgctcctcccctgggctagccttcctcctggggctttaacatcaaggaggcactggggctggccccagccggggaagacctgctgcctaggagccagtgggctcgcttccccatggtttctgaaggatgaaaaccgggtttcctgccctgtcatctggtcagcatacttggctgtgctggcagcccttggcaacacccagatcagatgtaagtgggggagcagctgatttccagggaaaaagccggaggaatcaactcaggggaactgcatcttacctgccgctggggaaaggcgggaacgcgacggactttagcttcttgtcctccgccgctgacaggcagtttttgatggtctcttcaagctgttcttcacatttgtcggagccccactgagggatgtgacagtggatgacaaatttggctgcgagtccactggattggctgacggcggctgggacataggagagaaaatgccgcgggttatttcctaaggtttcctaggttatagcctaacctcatcaggtacctgttagatctggagataaggcagtgatagagacgttggctgggcagcatcctgtgctcctgatgtggactatgtttaacgagagcaagagctgggctgtattgctttgcacagttagcacaagctttgggtagaagcgtttaatgctgctctgatgcgccattttcatatggtctgccaagtagtccctgggttgggctacctcctcacaatggttcctagttaaagggacacatcagatcctctctggtggctgtggcaggtaaagtaatggcatcccaaaacatccacgtcctcctccctgaaacctgtgggtgttcccgtacatggcaaaaaggactttgcagatgtgattaagtgaaggctcttgagatggggagatgatcctggactgtctgggtgagcctgggacctgataagagggaggcaagaaggtcaaaggcaggagaaggccgtgggatgaaggagacagagattggaacgatgcagccaggagccaaggaatgttgcagcttagaagctggaaaaggcaaggaagggatccttccctgagcctccagaaggaaccagccctgccaacacctggatcttagactcttaaaactcattgtggacttctggcctccagaactgtaagaagacaaatttgtgttgtctgaagccacgaactttgtggtaatttgttacagtagccacaggaaatgaatacagtggcttttatttttatttttttatttttagtttttttttgagacagagtctttttctgtcgcccaggctggagtgcagtggtgcgatctcagctcgctgcaacctccacctcctgggttcaagtgattctagtgcctcagcctctcgagtagctgggattacaggcatgtgctaatttttaaaatttttttatagagatgaggttttgctatgttgcccagactggtcttgaactccagggctcaagtgatcctcttgcctcaggcacccaaagtgctgggattacaggcgtgagccatcacacctggcctactgtggcttttaaaaaatagctgtgcctgggccccacagagtcagggtactgaccacccagaggtcctgactcagtaggtctggtgcaggggcttatgcttatgtgattttaggaccttctatgagttgagaaccactgaacttgattgtgtagttccttgacagggactgccatttgatgatctccacatgccctgcagagagtggggtttcaaaagcgggctgtgaaactgaattaggccagccttgtctcacaatttctgtcatactcctttgttttactgtttactcccctaaatgtggttcccattggtgacagagttgataaagccccgtggctgctaagctcgagggaagtccctgtgggactccccaggggagcagttccctcggatctgcctgaggcagctgcagcttcagccatgagccatgcttgcccccacgctgcccgtctgcgccctgtgcccctccaggaacccaggaatcggcgtagcaagggtccgtggccactaggggcagcacttgtaacagaaacgtgtgtccgccgtattccagagctgtgtgtggggttgaggtgaaagactgactggaaatctatgatgcccacctagtttatataagtatttcctggcaatgtccacagtgtcagggaagtgctgactgcacttcctcacatgggtagaagccaaatccaagggaccccttcgtccatcaggggaggctgtaggctccctgccttccagtgcctagacggggctcagtgtcatcacacgtgaacgcctgagtgcaggacccaggccacacaatacaccgaggccctgggtaggggcccgccatgcgtgctgactctacgaccacgtatatttgtgcaccagaagcagagtgtccctctttggactgaacaatgatgcccctaaaactggaggctgctctgctgagaaccaaggaccctggagatgggccttgcctgcatggtgccatcttcccgagcacctggctgctattgtatgccggacagagtttggcttgttacagtcatggctgatttatttcatatattttaaaagtataatcatgttactagcagaatggtattcctctaatgtaaagtcttttttttttttttttttttgagacaggatgcccctctgttgcccaggctggagtgcagtggctcgatcacagctcactgcaacctctgcctctcgggttcaagcgattcgattctcctgcctcagcttcccaagtggctgggattacaggcacccgccaccatgcccggctaattttttgtatttttagtagagatggggtttcaccatgttggccaggttggtcttgaactcctgacctcaagtgatccacccacctcggcctcccaaagtgctaggattatactgcacccagccaaaagtcatttttaaataaaaggaatatgttcctattggcaatgtcaaacatccaatcaagtaaaaaatgactttcagggtagtgcacgatgacatttcagtccaaaacaaagtatgttcatggcaactggaaatgaataacacagcttgtagccataatgctttgtaatgttctccagagttgtcaaggatgagggtcaagttattgcaagggctgtgaccctggtatttggtataagcacctatccacataatgactaggggcattctcttacctaatgtgatgttgcctggtgaagacctgcattctgagggtggcagtgctgctgctgggagcttctagaaccttcccccaggtgagccatcacagttcttgggagtcaccacagcaaaaggggactctaggttggccccttgtcctgctgagaggctgctactgctgatgcctggtttccgtgacactgtgggttttcttttaacagcacctcagtttcccacaatggcctctcttcttcctgcgtgtctgggcccagtgctcttctctctgctgcagccccacctcctaagcagccatctgcaagccattttcctccttagctttcaacagggacctgcacctcatgacctttctggggccccagggctaacacgtgcccagtaaaatggccattcactcctgaaacccgattcccctttttccctctttgtcactgcagacaccatcagtttcctctgccttgtctcatttcaggcccatgtgcttcattttcacccccactccacccccaccctcatccaatacagctttcttgatggtcttcgggccccagccctctgtctgccaaaccatcctccacacggttgctggagccaaggtccttaaactccacatttaaactcagaatctgcaactgctcctgattgccccctggccttactgcagtcctcccaggctcccttcatggtcggcccctctccccttggagtctatccatttcttgctctttctggatgcccagtcgtcctccagccagtgggctcagtcccctgcacacatgggtctggctgcacctctgtctccacacttggctatcctcctttgtccctgactccctcgcccattctctccgggcctctgccatgcaattcagcagccagctgtgctaagtgatgtactgtgttaccctggggtccccgcctggttgtaaaattcaggagtgttcagggcctacaatcacatccacatcctgatgcctgcgcccgacagcacacaccgtagatgcttaacgtgaactggttctgccccagctgacatcttcactgaagcacttttgtattccttgctgctgcctggctcctgccacagtcactggcaggcaggtgctccaatattcaacaaatgaatgaaagtcctgacttttcatcagtttgctcagccctggaaaccctggacttaccttagctccagcttctgcctccctgaacatgcagcatcgctgcctctcactgactctgcacctgaaatattttcttgatccaccctccccgaccccctgccacagggtgggcctgcactgcagttggtctgttttaaccatgttaagatgcactttttttttgtttaaatattttaatattgttgaaatcaggaagcatcttagaactgctgtcagcctggagctgagttcttccagaaagaaattacatttccttctatgtcacctggggacactaccaaactaaggctatgtctcactctcttctctgcctcaggttttgagctgcactggatctggctgcaaatcttcaggagcactggcttgcggttcaaattctttttctgttttttagacacagagtttcactcttgccacccaggctggagtgcaatagcgtgatctcggctcactgcaacctctgccttctgggttcaagtgattctcctgcctcagcctcccaagtagctgggattacaggcacccaccaccacgcccagctaatttttgtatttttactagacagggtttctccatgttggtcaggctggtctcaaactcccgacctcaggtgagccacccgcctctgcctctcaaagtgcttcgattacaggcgtgagccaccatgcctggccaaattctttagtgaggctttttttttttttttcctctctgtccactggatgccaaggtcaagatatttgctcctcctttctgcgtggtgggttcatgtcttgcttgctgttatactaatgtgccccagctttatgtggggcctcctattagacactttattttggaaatttattttttcttaatgttacatacaataagagtatatcttaacaactgatggtgtttttaaatgaaatgcagtgtggtgttagacagtggcgaaccatctccccttctccatttttcccagggtgctaacactcactggccccaggccatggcttcttacacctaacatatttgcaccaatgtcttagctcaaaattgtgtcctgtagccctctccttccttccaggttcatgtctatttccttggtgcagacttttgtattctttccagctagtgtctggattgctgcctctcaacttctgcacgtctgaaattgtacatcttttgtcctcattcttgaatgacaacgtagcaaaatgtggaattcttggttgacagttttttttttcccttcagtgctttgaaggtatttctttcctgtttccacacatctttttttttgctgatgagaagtctgctgtcagtagaagagccatcatttctttacaaatgatctgcctctcctctcgggttactttgaaggtttcttttgatttttcaatttctaaggctttaccacaacactccaggttttggatttattttcatgtattttgcttgatattttcagcttaagggctcatgcttcatcctagaaaattctcagctacgatctccttaaataatgcttttctactttctatttctgcctttggaactctgtttagaagtgtgttggtgctgggcacggtggctcccacctgtaatcctagcattttgggaggctgaggcaggaggatcacttaagcccagcagttcaagatcagcctgggcaacacagcaagaacccatctctatttaaaaaataatttaaaaaagaagtgtgttggagcttctcattctgtgcagagcagctatttttcctctcctttgcaccctatcaggcagtttctggggaaccttccccacacccaggcccccagtcctgatgccgtcttagatgactgagttggggcttggtctcatggttatatcggggatgtggtagagccaaacattgagtcggtgggcaatgtggccctgggcttgggtgaggggctctcttctcccttctgctaccctagaaagacagatttttatagaagttgtagccctgggtggtggcgagagctttggcttcttgtaaaggccgcgagagtctcatgcagccccttgctttgggcagtgagtctggctctggccctctttatactctgatacaaagtgaagcgactctgcatcttatagacctggagccgaggcctggggcggcagcatcctgcaggtgctgctgcagccctcctgtctctgtctacatggaggcttatcttatatttgagtgtggctcttagggtttttaaagagacactgcatctattactgctttgcctgtggggagtagtgggtggagatttaaagtgtgggctcttgttctttctggactagaagcccccattacttttttcttttcttcttttttcttttttttttgagacagaatctttctctgttgcccaggctggagtgcagtggcacgatcttggctcactgcaacctccacttcccaggttcaagtgattctcctgcttcagcctctgagtagcttgggattacaggcatgcgccaccatgcctggctaatttttgtatttttagtagagacggggtttcaccatgttggtcaaaccggtcttgaactcctgtcctcgtgatccgcctgcctcagcctcccaaagtgctgggattacacgcatgagccacagtacctgggccctacttttataacaatcaagtctaatctggacagccccctgcttaaacttccaagtgccctcatgtccatgtagggtcagatccagaccccttcgcacagcccacaggcccagactcatcttggctgctgtttctctcctcccacgtgctgacccaagactccctgctcatgcaagacaagcgtcttcttgcatgcagtgctcctattgccctctgtgtcccacccccaaggggtctcacagcctcactgcagtcctcccacgctcccctacgctgaggtcgtggctcctgctctgtgccccaattatgcatctgagggcagcggtgggttttattttcctctgaagccctgcggcacttggcactgactgagggtacaaggagtgaactgattgggagtcatgtgggtgggaacatggatctgaggttgaatccacctgtcaaaaagttgcccaatatcctggacaagagatgtttaaaaaaaacttgtgcacagatgttcactgcagctctattcacaatcaccaaaggcggaaacagcccaaatgtccatcagtaaatgaacggttaaacaaaatggaatattattcagccatgaaaaggaataagtactgacccatgctacagtatggatgaactttgaaaaaaatgttaagtgagagaagccagacagaaaagtcatatattgcatgatcccatttatatgaaatgtccagaataggcaaatccgtagagacagaaagtagattagtgcttgccagggcctgaggggggcactgggcatgactgcttaatggttagggggtttgttgggggaaaagctaagtgttgagagaagctgaggcagggcttgcatgtctgacgtaatgtaaaagagtcttggaacatgtccggggtccagattcgaaaacgccttgtggcctttggaacaccaagctctgtgccaaagggtggaaggccaccctgacacaccataatctaagcccagggcataaaacccctcgtggcttggatagaatccagggctcgtggctctgaatgtgtctagacttgctggcttcttgctccttgctctcccaggatcgattgtatcttgagttaaaagaacctgctctccattatctcaagtagcagaatatgttccaaatgcttcaaaggaaatgctaaactgtcacagctgtagatcatgcgcttgccctttcgacccccacatcctcatcacctgtttctttgtttgatcaccaataaatagcctgggcttccagagctcggggccttcacaaccgccacacattagtgacagccccctggacccactttctctctcaaactatcttttctcattcctttgactccgctggactttgtcacccccatgacctggtgttgagtccgatcaacccaacagggtttctgtgtgaggtgatatcaaagctctggactaggtggtggtgatggctgcacgacactgtaaaagtacttaatgccactgaattatacgctttaaaatagttccagtggccgggtgtggtggctcatgtctgtaatcccagcactttgggaggccaaggcgggtggatcacttgaggttaggactttgagaccagcctggccaacatggcaaaaccccatctctactaaaaatacaaacactagccaggcatggtggcatgcgcctgtaattccagcaactcgggaggctaaggcacaagaatcgtttgaacttgggaggcagaggttgcagtgagctgagatcatgccactacactccagcctgggcgacagagtgagactctttctcaaaaaaaaaaaaaaaaagaacaaaacatagttccagtggtaagtcctatggtgtgtgtattttatcacacacatgcaaagttcacccaatggctctagaccattttgggggatctgatgcaaactgacttgaattattcaaacatattggagtccccaggacatctgaaaggatctctatgggcctgcccaaattacctgagatgctaaaacagctttctgattagttatggcatactttgactcataagctgaataggcatgaggcacgtgaggctggagactccagagaggagggtgaggccatgctggtgacaggagcctagttccacacttaccttcggcgacttccaaagggccttgggatttgcgaagctcctttaccgtttccaagaactcttttcccccagccttttccaaggctttacctgcaaaggagagcaatgggaagccactgtggttgttctttcaatctaattacactgtttgacatatttgtagtaggccaggagaaaacaaaagcactgttagaaactaggaattgaacttcccaattgttatcctggtttgccagtggtcaggggaggcaggggactctgggcctcagtctagcagacttagattggcaagcttttaccaaggatattttaaggggtgatttggccataaagcggtctcatggcttgagtcttgtagatgatttaaaaacaaaacaacaaaaaactgtgattctagtgttgtgtcccacaggtttagtactcatgtggagagctctgaagtcctggtcccatcacagtgccatcaacgtactgtacgtgcttgagtcaaaggacagacagaggcccagggcagcctggcatgttgttcccccaacccggtgctcagtttgcaatggagaaatgcagagaggctaatctctaaggactttcctgccgggagatgccctgagcctttgatgttaggggaatgccccactctttcttttttttcctacctcagctcttacttctacacaggccaagtggaacccctgggagatgacaggacaccacctctgaccccacaggaaccctgtcggtgtgcaccagcgcatccagctctcatgtctctgagatgacatgggtgttttgtccagactgggatgacggcagctttggggcagcagaggaggcatttttcagatgttttcatcttcgaatgaacttggtgatctggatgtctgcagcaagtctcagcaatctctttatgaatcatcattattattatggttcagttcatggtctttcccagggcctgggtgctgatgcttccccactccacactcgagcctcaagtatatgtggacagccacagtacactgtgcagctggtttaggacaagtgtctattccagtggtcactgtccactgggggagggcgtgcagaggggttttctttgttaatgttcttgggtttccatgatgcaactgagaaatggtgattgtgcattatacccagtacccctgagactcctttctggcccccagattcctggacactgttgatctattgggtccagaagcctggagaaggccgggtaactgaagctggtagccagttcatgttgagaagcagaggactaggtctacactggcgccctctgcattcaggtcaagggccaaatgggaatgtgcagaaggcaaggggaatccaccctcctcactgaagccttttaagaaaaaagcatcctggagagaggtagtttctctctacagaagcattcccaagaaggaaaggagcaatgctagaatgagaataccacagctttgcaactcctaacgaatggcggaatctagagaagaggcatcaatggccaccagcatcacaccaatacagacaaccaggcacgacgcgcctcctcgggcacgagcactcgccactgaccaaggagtcttggcaaagttttcgaacctacacctcatgaaacctctagatccaaccaccaagttataaaaaagcaaagaaacatgttttatgatgccaggaggatataatcaacaaaatccggactgcatgaaaccctataggacaaatggcccagcttcctcaacaaatgaattgcaaagaaataagaaagagatgaaggaggaacctatggtataagagactcatcaaccaactgcagtgcgtggactgatttggatccgaaatcaaataaacaaattttctttctttcctttcttcctttctctctccccctccccctccttccctccctccttccttctctaccttcccttccttcctttctctctctctctccctctgcctctctctttctctctttttctttccctccctccctccctctctctctctctttttctttctttcctttcttaatttcttgacatggtctcactctgtgcactctgtggcccaggctggagtgtagtggtatgatcacagttcactgcagcctagaactcctgggcttaagtgatcctcccaccccagcctcccaccttagctgggagcacaggcatatgccaccaagcctggctaatttttgtattttttgtagagatggggttttgccatgtgcccaggttggtctggaacttctgagctcaagtggtccgcccacctcagcctcccaaagtgctgggattacaggtgtgagccaccgtactcgggccccccttttttataagagatgagggtcccacttatattgtccaggctggtctcaaactcctgggctcaagcgatcctcctgcctcagcttcccaagtagctgggactacaggagtgtgccactgtgcctggcttaaacaaatgtttaagaaacttgacatttatgatgtaactggaattggaacactggtaatttgttgatattgctatctttttaagggtacaataatggtattgtggctgtgttgttagtaaacagcccttatctgttacaagtcattgtgaaatattcatagataaaatgatgtctggaagtatgtggagggggtaagagctga

SEQ ID NO: 16 - DNA, 11428 bp, Homo sapiens
taatagtttgatacatgagtttttttcaggtgatgggaagcactgtggctgttggtgggatctgctgaaggcggggacttcactgtgatgatggagctctctgcctcaggtttcctgcagcccagcatttttgtatgaggccatggtgttgtgaattttttgttccaaagattcctggatgtgatctgcgtgaattccatggacatcacgagctctttccttctgtgatcctggtggtcatttattattttttaaccttcccgaaaagatgcagcgtgaacctcgtgatcaaagagcagctcctggtagggccttggtgtctcccgctggcccatgttgatttacagatgccatataatgtggtgtaaggtggtctttccctgggtttgcaggcagcaatgtgttgatgagtccttctccctttttttaacatttatttttttggagtctcgctctgtcgcccaggctggagtgcagtggtgtgatctcagctcactgcaagctccgccttccgggttcacaccattctcccgcctcagcttctcgagtagctgggactacaagcgcccgccaccacgcccggctaattttgtttttgtatttttagtagagacggggtttcaccatgttacctagggtggtctcggctagtgtcgatctcctgacctcatgatctgcccacctcggcctcccaaagtgctgggattataggcgtgagacaccgcgcctggcctcttctccttctgaagaaaggaacaactgtatcttatatttgccacacagtatttgtttcttcagctccacaaaggtctgacaaatggtaaggttctgtttattgtggtgtaaaaaattactccagattccacctctacccattcaccatagggcagtataacagggagttgcacagaaggtgtccagcttgtagcctatcataaatctggtgccaaagacaaagatattttatgttgtagttggcatcttgtaaatacaagtacattctggggcatcaggttcctgtggaaatgtttcttttggtggtggtactgtagggcagatagtatttgccggaacttgcctcaggcctcttcctcctgcttttggtggggctctaggatgtagtgaagtagctgccccagctggcatgctacatgactcagtgtagagtgcccacgatggcagtcactggaaggagctgattgaggttgggtgattcggggcccttattatatcgacttcacagctgtcaactccagaggctggaggagctctgctgacctctctaggtgaccttcacagccacctggatcccagtgagaatgttctggggtaactgtaccttggctgcacgtgggtgcttaataatgtcacctggactctctcccaacctctgactctgtgtccttccctcagtgtggatgtcgtgctcaggtgggctttcccttcaaggtgacaagatggcacccacagccccagccacccaacagaaatagaccttctctcccctgctaccaacccttgtcctgacccttgccacctgattggtcacatgcccaggtgttagccaatcactgtggctgtgtaggttgggttcttctgattggcgaggttgaggtcatgtggctgctgttgccagggatacttggagctgctcccctgttttggtgggagatagtatacccactggcttctgtgtaacagaatccacggaggcatttttccctctcccaccacctcctccccaggccgcatttcacccatcccagaaaggaacaaggagcagacttctgtctgaagataggatttgggattcccctcagcttcaagatttgctgcttgtcctggtgccatcggctactcactcaaccaacatgcaatgagcaccctcgacataccaggctgtcactaggtgtgatacaaggatgagcagggctaatgggactcctgtcctccaggagctgacactctagtggaagtgcacagacaaatcaaagaccaattcagatcagatgagtccagatgaggaaagagataggatgggatggagggtgccatggaggtgtccccagcaaatcccaatttgctcacttcaccatgcactcagcctcatgcagtgtagatcataggaaatggagtacacatcatagaaagtcgccttcacgttcaggcagctgatgaagtcctgtgggctcagcttgttcaggtcaaaggttatgcgggccacatccatcttcttggcaggcttatgggagacagacagtgggtgcctcatcccctgcattgagacaagcagatggttacaccccttgaagacttctcccagggtcccacttttctcccccaacaggtgggacctcacctgttctgatgggggctcccatttctgccccttctggaggaccaggagcactgtattgcctgccagagcttggaagggaggactcttcttctgtctctacagttgtgccatcttcctccagcaccaggaagaagggcttgtctgccagcatcagagtgccctggtcctggggaataaggtcggtgatgcttctgccatctctaagaagtcagagcaagtctgggaaagccccacgtcatagctcctcagctgccagggaaagaacaagtgggctggggtctatggggtagaactggagcccaggccctctgctgtggaatcactatgtagagactttatcttggtacctcttggtgcctggcttcagggttcatagtctggaacaatattgtccgataaaatataatgtaagccacatatgtaatttttagttgagatatcatttacatactataaaagtcaccctcttaaagtgtacaattcagatcccagtactgggcaaaatggtgagactccatctctacaaaaaaaaatacataaattagccaggtgtggtggtgtgtacctgtagtcccagctactcaggagacttgaggtgggagaaacacctgagcccaggagatcaaggatgtggtgagctgtgatcgtgccactgcactgcagcctgagtgacagagtgacaccccatctcaaaaaaagcgtataattcagggttttttgtatattcacgaagttgtggaaccatcaccactatctaacttcagaacatttacatcaccccaaaaagaaacccagttccggccgggcgcggtggctcacgcttgtaatcccagcactttgggaggccgaggcaggcagatgacttgagattttgagttcgagaccagcctgattaacatggtgaaaccccatctctactgaaaatacagaattagccggacttggtggcacatgcctgtaatcccagctagtcgggaggccgaggcaggagaatcacttgaacctgggaggcagagattgcggtgagccaagattgtgccattgcactgcagcctgcgaaacgagtgaaactccgtctcaaaaaaaaaaaaaaagaaagaaagaaacccagttcccatcggcagtcactccccattcctccaattccccatcccatggcaacagttattttctgtttctatggatttgcctattccagacatttcatcaaaatgaagtaatacaatatggggtctttttagactgacttctttcatttagcatgttttcaaagtcatctgtgttgcagcatgatttatcttttttttttaagagacaggatctcagtctgtcacccaggctggagtgcagtgacacactcatagctcattgcggcctcaaactcttgggcacaagcgatcctcctgtcccagcctcctaagtagctgggagtacaggtgcttgccattacacctgcctaatttttatatttttgtagagacagtgtctggctatgttgcataggctagtctcaaaatcctggtctcaagggatcctcccaccttggcctcccaaagtgcttggattacaagcatgtgctactatgcccaaacatgattcattcatttttgactaaataacattctactatatagatatagcacattttcagatccatttatcaattgataaacatttagcttgtttcttattggctactatgaataatgctgctgtaagttttggtgtacaagtttttgtatgaacatctattttccattctctttggcatatacctaggagaagaattgctgactcatacattaactctatgtttgacttttttatattattttttgctttctttttgagacagggtcttgactgttgcccaagctggaatgcagtggcacagtcactgctcactgtagccttgactctggagctccactgatgcccccacctctctgtgcagctgtgtgacctcaggcaagttacttaacctctctgtgctgctgtgtgaactcaggcaagttacttaacctctgtgtgcagcgtcagtcgagttacttaaattctctgtgcagctgtgtggcttcaggcaagttactcaacccctctgtgcagctgtgtggcctcaggcaagtgacttaacctctctgtgcagctgctttgcctctgacaagccatttaacctctctgtacagctgttttgcctctggcaagtgacttaacctctctgtgcagctgtgtggcctcaaggaagttacttaagctctctgtgcagctgtgtggcctcaggtaagttcaacctctgtgtgccacgtgtggcctcagacaagttgcttaaccactgtatgaagctgtgtgacatcaggcaagttgtgtagtttctctgtgcagctgcatggcctcaggcaagttacttaacctctgtgtaactgtgtgacccaggcaagttacttaacctcttgtgcagctgttttgcctctggcaagttacttaacctctcagtgcagctgtgtggcctcaggcaagttgcttcaccccctctttccaactctgagacttcagagaagtttttgttttttgaggacagcgtcaggccaaaggtgcagtggccctcacactcatagcaggcccccccattctggcagagttgagctacagcctctggctacatgtagacttgattagtggcttaaggtcatcagaaggtggaagatttgttagagatgctgcttctgtggatttctagagggaggcagagattgttacctaggtcagctcctgattagggcagcgagtgggctaaggcagtgcgttccagcatgtgtcctagagaatgctgggtcctcaggatactgatagatgtcataagaaaaattggccccttggccagttcggtgtgggatgttaaacagatttctgtgtgtgtatgtatgcatgtgcatacatgttctttgctcaacataagaaaagttctaagtgggctgctacatgaaactttgaaagtgaaaatgagccagtcgcagtggctcatatctgtaaccccagcactttgggaggccgagccaggtggatcacttgaggtcaggagttcgagaccagcctggccaacatggcgaaaccctgtctctactaaaaatacaaaaattagctggacgtggtggcgggcgcctgtaatcccagctatttgggaggctgagacaggagaatctcttgaacctgggaggtggaggttgcagtgagccgagatcgtgccactgtcctccagcctggacaacagagtgagactccgtctcaaaaaaaaaaaaaacaaaaaactgaaaatgtagctgcattagcctgagagccaagctgtgcagcagatggcttatggctaaggcttgtcaggtctttgctggggatggaagtcacggggtgtgagagcggtgggtgaagtcaagaacaatgccaaggggaggtgggtcaagtcaagaacaaagccaagggctgcttctttctcaggcagctctcacttcccatgggagcatggactttggggtcaggtgggcctgaggtcatgttcttagttagctactcacaggctttgtcaccctgggcaggtcattttacctctccgaggctacagtttcacatgaggataatactacatttcacagggctgtcaaaaatagatatcaaggttgggagttaaatccagtttcaaaaaaatacccaaacagggatattaaagcaggcatgctggtgggtacctgttgtcccagctactcaggaggctgaggcaggaggatttcttgagcccaggagtttgaggctgcagtgtgatatgattaagcctgtgaatagccacagtggtcagcctgggcaacatagcaagactttatctctaaaaaaatttttttttaaaccagggatattagtagatgatggctgtcatcatcactgtcatcattattataattttctaccacatgtcttgtcagtgttcatagtagccttttcttatgttagttcgtgactcagatctctgctaggtggcatctcctaacgctgcagtctgggtaatgtcatcaacaaatccccagtccgaacagacactgaagtgagctcggcctgtctcgggtctgtcattacttctgcagcctctgatgaacctcgcttctggcctcctaaggataagccaacgccccaccccctctttcttttgatgagtccttttccctgcacggagcttctggtgaaggtggtgggagttgttcttgcagagcacatgggagtccaacggcctggcagtgggccaggatcttgttgccatggtgactgacactgttttcgctgaaattttgccagatcctgaagatcttcgtggacaatctctttgctatcgtcctgctgaagcaggccacagctgtgcgctgcttggacatgagtgcctcccgtaagaagctggccgtggtagatgaaaatgacacttgcctggtgtatgacatcgacaccaaggagctgctttttcaggtgaagtccccgagggggcccagggacatcgtcctttgattagaggccctctctagcttcccagtccctgcaggaggctcttctgctctggcccaggcaggtctctgggaggagcagtgaggggcaggggccaagcacatgcatagagtcccagaggccctgggccacaacctgctcctcccacgcaggcacaagccacagggcctggaccagcctctttaactttggttttcttgccaatgagatgagccagcagagcctttcttaagcgttttccatgaacaagaaatggggcaatgactctgaggggggcgtgacgttagcactcagtgaatggggcgatggatgcacttcctttgcagaagtctgcgtctcacctgctgcaggcctgcctctgtctatgcacacctacagcgagggaaggaaacagaatcagttttgtcatctgaaagggggaaggggatgggcaagcctgaccttctgtttaattcacaagaatcctagaaaagccagcagaatgcgaagtgcttggatctttggggttgtaggcgttgtttagtggagtcatccagccctgtgggctgaaaaagtgtgtcaccagagaagacagcccggcagctctgtgccccgggcctggctggctttctgctgggctcgtgccattctttgtctcttttgggctttggaggtggggagggctggtttggcagaatcgagttcccctcaaagctggagcccctcctaactggtttcctcggccactgcagggtttcctgatgttactggcagattcagttcccttaccaggctcctctttgctctccgcagcagaatcaataggggggaggggcctggagtggggagcagcctcagtcaattagaaggggttacctcggccgggcgcagtggctcatgcctgtaatcccagcattttgggaggccgaggtgggcggatcgcgaggtcaggagatcgagaccatcctggctaacatagtgaaaccccgtctctactaaaaatacaaaaaatttgctgggcgtggtggcaggtgcctgtggtcccagctacttgggagtctgagcaggagaatggcatgaacccgggaagtggagcttgcagtgagccaagatcgcgccactgtactccagcctgggcgacagagcgagactccatctcttaaaaaaaaaaaaaaaaaaaaaaggagttacctggccacctctagcccagaggtgactccctgtcagtctcaactcactcatgtccctgagagagtagaatggttcgggggaaagagagggcacacccttcaggctgacctaggcttgggtcctgcctgcatcccttcctgtgtgatcttaagcaagttagtgagcctctctgagccttgatttcttttctctaaaatgaaattagtaattgcccctcacagaattgctacaggaatgaacaagataccacagtgcctagctcagtgctgggcacaaaatggggcctgaaatgttacctcccttcttcccagcctcacctcccacctatagggggcgtagctggccccaaatgtgaatctgtgtctgagcctagaatcatacaaatgtggaagggtgtctgcgtgcccccgtccccactgctggctctatagcaggctaggggaggtgattctcagccctgccaggagacatcagcattcccagctgtgacattgcctgctggcttttcctcttctccactgcccctccccctacacataaaacagctatatatttttttctcattatagaagcaatctgcgctcatttataaaagattcagacattgtaaaacattctaggcagaaagctgtgagcatctactggtccctgaggctccagggctgagcagggaactgaggtgcagtgggtgcctcccagggtgactattttcacaatgtgtggactgtaaatgcaaagaacaagatattcttttcaaatcttacaaataacttaccgttctttctcttattatcaaacaatagatagatgttcatgacagaacaaattcaggcaaacaaaaaagattttctcattacacaatttcgcccacccattaacgctgttaatcctttggaacatattcttgtaaatcttctgtttacagagatgtatattccttctgtaatagaagtggaatcccactttgctgattctccaccttctttttttttcttttcttttttttgagacagtttcgctcttgttgcccaggcaatgccaccatgatcttggctcactgcagcctctgcctcccgggttcaagccattctcctgcctcagcctcccgagtagctgggattacaggcacatgccaccacgcccggctaatttttgtatttttagtagagacagggtttcaccatgttggccaggctggtctcgaactcctgacctcaggtgatccacccgccttggcttcccaaagtgctaggattacaggtgtgagccactgcacctggtctgattctccactttctatatagggactcatattgcaggagaatatttttcttttttttttatattatactttaagttctaaggtacatgtgcacaacgtgcaggtttgttacatatgtatacatctgccatgttggtgtgctgcacccattaacttgtcatttacattaggtatatctcctaatgctatccctcccccccgactccatgacaggccccggtgtatgatgttccccatctgtgtccaagtgttctcattgttcaattcccacctatagtgagaacatgcagtgtttggtttttttgtcctagcgatagtttgctcaaaatgatgatttccagcttcatccatgtccctacaaaggacatgaactcatcctttcttatggctgcatagcattccatgatgtatatgtgccacatattcttaatccagtctatcttgatggacatttgggttggttccaagtctctgccattgtgaacagtgctgcagtaaacatgcatgtgcgtgtgtctttatagcagcatgatttataatcctttggatatatacccagtaatgagatggctgggtcaaatggaacttctaattctagatccttgaggaattgtcaggggaatatttttcaaaagtaacgcctgcttactcaaaaattccaacaacacgcaggtgcatggaggggcttgcctctgttcatttctcttgcctctgttcatttctttttggtcccctttcctccttttccctccatcccactgtaagcaatttagtgggattcagtcattaaaagggtattaggctgaaatgtgcaagcgctgcccaagcccagggtggttctcacaggatccccactgtccctgtcccccaggaaccaaacgccaacagtgtggcctggaacacccagtgtgaggacatgctctgcttctcgggaggaggcaacctcaacatcaaagccagcatcttccctgtgcactggcagaagctgcagggctttgtggtcggctacaatggctccaagatcttctgcctccacgtcttcatttctgccgtggaggtgccacaggtaactgggagcacctgtccactctcagcactggcaaggccagtaagaccagggaagccgggcccctggctggtgctttgaggagagagtagcaaggagagaagaatggcagctgtgatgtcgtgggaggcagtctgggcttggaacctgcagccctatctccactccttgcaacctgtgtgactgggggcaaggagctcaacctccctgtgcctcaatttcttcctggtcccccttctggtaaggattcagaggggtatacagtgttgtcagcagagtgtattttacagagagcccagtgtgggccaagtggagagagcagcaaagccgggagtccagcagggtgtgtgtgtgtgagcacatgtgtgatggtggtgatgtgtgtgtgagagagggggaagagagagagaatgagtgggtggggggggtgaggcctgaggtctgtgagccaataagggagcatgggactctgcacaagccccctgaactaggaggtggccacagcagaaatggggcactgaagtgtggagccacagaatgcgggagggcagaaccacagacaggaggctgagattgacctcctgagtgcaagctggtctccccttcacctcctgcaccccacgcagatggtgcttaccataggattgccgtaaaacagagacacgcaccagcgagaaactttagcccttagtatcccatcctcaggacagaatcactcttaaacatgttgaaatacatctgcttagagcttttctatgtgtctatataatgtatgcataatatacaattagaagcatgtgattttataacatttttaaacaaaagtggaatcacactgcaaatactgtttcatgacttttatgtgtgtaagtattgctacctatagatggaacctcagatttactgtattccccaagcctggactgtaaacaagacttctcatcccttcctctatggccatcttctcatttcacctcacatttggttatgacagccccatcactgtctatgaagt

SEQ ID NO: 17 - DNA, 81796 bp, Homo sapiens
cggcactcagtagaaaacaggaaaacgtactgaaggcaaaccgttctgtaaaggatctctgtgggccgatatttatttcggtttgcactaaattagtcgtggcttcgcaagaaccctttgtctgtgggacggtgggtcccatcatggcaaccattatctattcgtggaaacgacatctgatgactccgcccgggctgggggtggggagggagcaccgcgtgtagagctcgactgagaattaaagtgagtgaacaaagagaactcccagcagccgccagccagctgcatcaggagatgttagtcacgcccggaaggctgttctagtccgcctccttggaaaagaagctcaagtaaataattgatggagaatgaccgaacccaggacaaagctttgcaggaaaccagtgcatccgtgttcgagcggttttgggatcctctgccaagtacgggataagagaatagagcaaggagtttgagcgctgctgccaatcttccatctcgggcgtggctctggcctttttgtctctttatcccgccactccccacccccgtcccccgtccccctccccgccttcttctctttcctcttgaaagtaacctctctttggttacttctaccctatcgtcccttgcaatcccgccttctctcctgcccagttcggtgaggtcagctcatgaacatctctgcacttcctggggagcgtctggcccagcttggtacctcgcgtgttagcctgctgagagctgcagctccagcccagccgcggaccgccgggaagtcacccgctctgggggcagctgaatcttgacgttaccgccattgtttggagaaatcgagtgggtgtggaactgcggcgagcgagcccaaagtcatgctcagccggaaagtcgcatacaataatatgaagttgaactttcctcggcgcagaaaggcacaataataaaccctgagatccccggaatatcagaaggaaagtgctgttgatttgttcagctacttggaaacctcgcctctgctgagaagtgagcaagttctggatttctaaagggttggggatgaatgatggggtgggttagcaggcggataaaacttgagattaaaagtgttggtctaagccgtgcaggggttggttgggtgataattttcaccgggaaagccttgaagagatgcagcatcttgtcactttgtgggaaccacgtgacagcagccggatacctttgattgtggagcccagttactggaacacaagctttcgcctgggttaatgctgtctgagggctgagtttaaacattggcttctcagctctggaattattctgcctgattaaaaacaaaaataagtttgcattggcaatataagttagttagatagcccatgttagtgccacccatgatgataaactaggccagacattctagtagtatcgcgactgggagagaagatgtagaaaacaagttggtgggcaattttcccccgatgtcttctttgttcacctttatatttcaaagtgagttggaaggagatgccagaaacagaaagggaggtggattaggaacccttcggtaatatttctttataaaatgaggaattactgcatgctaagttgtgatgctaacaatagatgttaacaagaataatgcaagtaaaataactggcagtaaagtaatctgctctctgtatagaacaaatatttttaaaggagaaatttatgcctagtcatgcccctttcagtgctttagacagaaataattttaaggaaaaggcaactaattgactagctgcctggatccctagggagaggaacccatgaggcagtaacttgctatttttcagattaaagaagctagtgacggatttatcttggaaatacacatactggaaattgatcttaccaccatgagggaagatgcaccagccttctgggttctgtctcagaattgctatataggaggaaatgggcactttaaaaagtacaacttttgcctatgatatgcgatgtaagaagatggctaagaatgaaaatattttctatctagcaattacacttaaaactaaagtgattcataagactacaaaactgggtaagcataggaaaattcatcaccagaaacttaggaaactgcagaactgaccacaacttttccaaatgtattttaaaaattatttcccaaaagggaaaaaatacgtttttgggttgctaataactaacccatatagacaattcttaatgctattattttcttgaaactgagattgatttaaaggcattcattatttatattttcttttagttctattataaaggaagttgggtgcattttcccaaaaacaacattaagggttggagctgcctggggaaagtgtcatttatccgtagaaaatattctctaggaaccctacatcataacccttttcctctaattgaacttgggaatactaattaaatgaaaactttctccagtaaactaggctttacatatggatttgatggtaaggaaagccaaagttgtaaaagcagagttgacaactctaatatatggatatcttttctttctgaagcttcttttccactttatcctcttttcttttatatctccctttccatcaattcctgtctgactctgtatctcaccctttccaaagcctgctaccatgagaatgtaaggttcagctgctttcagatccgtcattttgctgaggtggagtgagatggagacagcgccaccctgggcaaaatgagaattgacagccctccatcctattcctaaagacagccctgcatcctattcctaaagtcaaagcttctattaagcgccatccaaatggagcaatatcaccctttgctctgcaaaaattcagacatgttgtcttcttctctccttttgtttctgtcccagcttaggaaggaaggttggcggcggtgaagagggaagaggatgatctagtaatgggctcttccaaatcgcatctggtaggttcatagccatgagtcagccaccaatcgggggcgctgcccctgccacagcagcagcttctcccgccgctgcagccactgaggctcgtctgcacccggagggcagcagcagaaagcagcagcgagctcagtcacccgctagaccgagggacagttcgctgcgacagacaatcgcggccacccggtccccagtgggggccggcactaaactcaattctgttcggcagcagcagctgcagcagcagcaacagcagggtaacaagaccgggagccgcacggggccgcccgccagcatccgaggaggcggaggtggggccgagaaggcgacgcccctggcgcccaaaggggccgctccgggagctgtccagcctgtggctggtgctgaagcggcccccgccgcgaccctggccgctttgggcggcaggaggcccggaccgcccgaggagccgcctcgggagctagagtccgtgccctcgaaactcggggaaccccctccgctcggagaagggggaggagggggcggggaaggaggaggagccggcggcggctccggggaaagggaggggggcgctccgcagccgccgccgcccaggggctggcgagggaaaggcgtacgcgctcagcagaggggcggcagcggcggggagggggcctccccttctccatcctcctcttctgcgggcaaaaccccaggaaccggcagcagaaactccggaagcggcgttgcggggggcggcagcggtggtggagggagctactggaaagaaggatgtctgcagtctgagctcatccagttccatctcaagaaggagcgggcggcagcggcggcggccgcggctcagatgcacgctaagaacggcggcggcagcagtagccgcagctccccggtgtctggcccccctgccgtttgcgagaccctggccgtcgcctccgcctccccaatggcggcggcggcggagggcccccagcagagcgcagagggcagcgcgagcggcgggggcatgcaggcggcagcgcccccttcgtcgcagccgcacccgcagcagctccaagagcaggaagaaatgcaagaggagatggagaagctgcgagaggaaaacgagactctcaaggtgaggagggtggggggacccggctgggggatgggaagagtgggcctgggaggattagggcgtgtaccggcagggatcagaggctgctaacctgttagggagccttgaagagggaggagaacaagaaaggagggagggggtttcctaggccttgccggaatttgaatctgctctcagtaacgcgaggttttcatttaaattcaaatctgggcctccgtttctctaattataatggtttgtcacacttcttcctggagagaggtagagtaagagaacgagagagggcctaaagtgggcctttttcccccagtttcctcttctgtactcagctccttgtcactcctgtctcgtggagagagagggcaattaaagctgagaatttggaattggaatggggtgtgtacggtgtgtgtcggaagggctggaagcgagtttgattttgacacgcggcctgtcaccgcctcagaacgagatcgatgagctgagaaccgagatggacgagatgagggacactttcttcgaggaggatgcctgtcaactgcaggaaatgcgccacgagttggagagagccaacaaaaactgccggatcctgcagtaccgcctccgcaaagccgagcgcaaaaggctccgctacgcccagaccggggaaatcgacggggagctgttgcgcagcctggagcaggacctcaaggtctgcggcgcgggggctcaatggcgcgcggcaggggcggtgggtggggactttggccaagggctctttaggctgagaagtcttcagtggcgactggcaaggagccttagggacacagtttcgtagcgctaaccacaaaatactagggtctcagaagggagagaactggcaggtggctctaaagagtgcagagtgtgtggagggcctggcagcaaacgagctaagtgtgctctcctgggagcaaaggtggctcttcaagaggtgatgagaagaaggctcccttctgggcagaagcaagggcgtggcagagcgcaggctctagcctttgatctgcccttcagtctgtctactgagagaagtccggtggaatcgggcagtcaggagctgcactaaaaggactcctctgggggagttgaaacccaaaataggaactgcactgggaagatactagagttaagatttctttcagcaagtgtccactccacttccttcttccaggacttcttcctttctgcacttgccacttaggtgactccctgagggggaaaaaaaaaacagataaccaacttgcagcctgtttggtgtgaggtaaatgaaataatctcatttttttaaagtgcaattgttccttcagaatttcttccagtggaaaaatctcaaccttgaagtgcattttctagacaggtgtggtctccagttcagtttgactgtaggcagattcattgactatgcaaactagacattaacttaatctccttgcacaaccaaataagtatacgttcattgcattaacttcattgggatttaaagatcacgtgtaatctttgttttaaagaaagctatgtgtaaacattttatgaaagacgtattactttttttcttaacttttgtcgagtgcttagtatgtactaagcactgtggcaaacactgttacatacattattatttcatttaattctcaagggaaaaaaaatcctacaatgtagggattattaaggcaccattttataggtgcagaagctacaccttttacagaggttaagtgcccaggcctggaaaacagctaataggtgccaggctgactctccactcagtccaaaatcacaacctgtgtcctaagcctctacaccagtctgctccacttttcttccaaaccctagaatttccaggataatctcaaaatatgaggcaaaaatgcacagtcattcaaaaaataataatctcaaggactaaaactttcctaagattaagcaactggaattcaagctataagattgaaattcaagcccaacccactacttgtaaaaacttcaatttttcattctttaacatagattataatggaaacatctacctcatagttttgctgaagtaaaggaaatttgtgaaatttctctacatgtgataaaatgcaatagaacattttttaccacagagtagtgcagaagttaagggaacaaaatttagagccagattgccaggcctcttagcccagcagtgtctactcattagctgtgtgaccttgacctctctgagactcagtttcctcatctacaaaatagaagtaataatagtacctatcccatgggatttttgtagggttaaacgattgatatatgtgaatggcttatatgtatactttgtggaataatgcctggcacatggtaaacaccatataaatattgggttttaatgctttcaataggaatacaattttagcccttattatattgtcattaattatattttattgttacaaacaccttaattcaggttgcaaaggatgtatctgtgagacttcaccatgaattagaaaatgtggaagaaaagagaacaacaacagaagatgaaaatgagaaactgaggcaacagctcatagaagttgaaattgcaaagcaagctttacagaatgaactggaaaaaatgaaagaggttagtatttgattatttcatggtgtactatgtatttttagccctttaaaaaagaatcccaaggactaatatgactgttaaaaaatttcttttatgattgcaggacaattttttactcttacccaaatagtaaaaaatacatgatttcatactaataaatgagtagcaacgaaagattctgacctaaacacggtatctaactcgacatgtacgagctttgactgatctctgtgtttcatctctgtgtcttctaaatgtatgttaattaaatcaattccacagcatattaaatgcaaagagtgtcaagcgtgtgaaggaatgagacttgtgatagttgaggggaataattagccccatgagattacttacaattgagttcatagaaccatgaatttttaggatggaaaagactctaaggtccatttgatctaatccattcattgcttgaagtctatatatagcaaagccagcccttcccgcaatgttctaatgcttgcaatatcaccagtgactatccctgaagatcttttacagcagccaattgtatcatatcatagctctgtttaaagattttccttttttttttacatgatatatatttaattgcaactttagccagctcatcttagttataccctttagggtagaagagtaaagttctccttcatgtcagctatttgaagattccaaatgtgtttaccatgagtcttctaaaagaacagaatcaaggtaaagaaatggaggagaaaagagacagaaacacctatcaagaaatgattagctttaagataaacagcaatttaattagaattaaattatacttctctttgatagctacctgaacatgtacaatgcaacttgtgaaaactaccattgagaaatagcaaatgcacaagttgtcttccgaaaaatttcctctgcttggataagcagaattctaaagaaaattctaatctttccacagactgaggtatttacccacctgtcattgctgtgcttatctcaaaatggtacaaaaatataatgcaaataacagtgcaattatcaacagtctgattaagaatatgtcttaggactttgaagaatacagtttcagtggagtaaactattttttgtgatctgtttacttatattatcctgactttaaacattttttagcataagaaaatagtaaaaaaatattttaatgatataaaatccttggctactagctaggagtcgctctgtgctatagtagaaaaatatggagactgggagctgtgtgatctattttcaccagtaactgggtgactttaaaaggcctgtaacttgtacttgtctacttttatccagttctacactgaaagattgtttttgatgattctcaacatctttttctggtatgtaagactttcctcatgaaattcagaacattgccatttaaggaatggcaaagattttttccctaaagttaaaagatcaaatatgaaattaatatagttataagtatatatttcttcaacaataatgtacagttgaaggtatgtcaaaaattgactttcatttatagaaaaaaaagtaaagtaggtaactgtattagttctctagggtagctgtaacaaaataccaaaaactgggtggcttaaacagcaaaaagatgtattatctcacagttctgcagtctagaagtctggaatcaaggtgttagtagggctggttctttctgagggctgcgaaggcaggatatgttccaggcctccctctatggcttgtagatggccatcttcatggtcacatggcattctccctgtagctctctgtttccagacttcccctttttgtaaggatatcagtgatattagattagggtcttccctaaggacctcatttgacctgcctgggctcaagctattctcccacctctgcctccctaagagctgggattacaggcatgagccatcacacccgcccctcattttaatttgattacctctgtaaatacctctgtctccaaatgagatttcatcctgagcagctgggggttaggacttcaatatatgaatttgacagggagggtagaaggagagaacagaattcaacccacagcagcaacaatctaatagcttcctgtgagcaagcaaagagaatgttcattgtcagtctcataggcgccattccctattcatacgttacttgtgctctctcatattccttgagtgttttaaattgtaaacattcaagtacaaacaaacttcgcttgattaccagagataaaaaagaaatgccttgtaatttggtgtcatgtgaatgttttaagtggatacctgaaaaattgtacttaagaatggcataagagctttctgattttcattttacttccattaaaggggaaaatatgcatagactgtctatccattagccagaacaatgggacctctcccatcttaaaataaaagccaaaataatctggccaccaggaagaaagggtagagcttgggaatgtcctcaggagattgtaaagatgcgtttccttgattcttttgctcacactcttccctgtgactatttcctccttcagggctctatttctgggttgggagaatgctgttccagcaccaagcagtgtgggtatatatattcataccaaagaggcaatttgattgtccttggagttacaaaaaaccaaatgtcaatgcctgattagggaatacaacaataaaagtaaaaataatttaggagtatatatgcagaacatcagcctttaaagtaatcttttattaggaaaatggcattcacgatttgagaagatggaaggtggtggggaacagaaataaaaaaaaacaggaagggagaaagagtggaagataaacatctggaggatactaaatataataaaggaaaaccaaataatattctggtaggagttctctataattatccatttgaggttgaccttcatagtgttcagaaaaatgtcagaaatagaaaaagtagtttaacaatatgtttagaaatcagaaatgtttcattcagataagatttttgcaatggtaattttatgatgctctaaaacggtaaatattaaaactgagctgcaattataactggcttactctgtggataagggttgtaagctactccttggatgacttgcaacaacttcagttaaccatctgcttcattggttgtaaaatgaaaacatattcaagcccttggtgagtgttaaccaacttggttaatttggtgagtgatgaattgtcatcccttcgtgtcatttttttaaaggagaaaagtagaaccaggccaagctctccattaagagaaaagacactagttatagagtaaagtcaaaaaatcatagaatatactctagagaagcaatcctccaattccaagtttttagatctttacatggagtcatatagatgttgaacagcaccgctgggaccaatagaccatctgctacagtttagaactgtttgctaaaaatttaattagcttcaagggtattgaccaattgctctcaggactggtggctgcacaaggtcttgtgcacctcctcacatctatctgtctatcttctccccctgagaggatggagtaggcacctgggagtaagaagaattgagtagaggcaggatagaggtaattagctgcatctattgcatctcattgcttgtattgaaatagctgatgtttgaccaactgcaaacaagagggacctcttcgaatgctgccttcgaatcttaatagcattgtcatcccaattataaaacactgattgctaccagcactatgctttcttgctgtagaagaatgcctttacctttctgtaacctgtagaaaatggcattctatctttcaacattgcaaatgatcaaagagacagaggtttttaattaaagttatgtcatgtaaacaacaactagctctttgaacgtcatacacaaataggataaagtgaggttgtggaggaggctttggacaatgcattctctgtgagaggtgagtttttgctccagttaaattgaggatcactgcctgtcatgaggttccgctgctgtagcagtgaactttattttcaaagctttgaaactccttgtaatcatcaagagaagaagggtcatctgatgtcacttttaaggtctggtgcttgttgaagtgttgataagagacatttgagcaaagaattcaccaacagaagagcaaagaaaaagagtaagatgatgatgatgagaactgtttatcagatctttcttcttttcagaatctgtactccttatattgtctcatacctcacccatacacaagattcttaaaagaaaataattttcttaacttttcccagtctttgctccagagggttcttaactggcctactgaaatagcaccatctatcttggacttttattttttgtgcacttggtataatagatcttatctattacaatgaactttcattctagaacacaaaaataattagtactataaattttaacagcgtctctggttttcttgttttttagagtcccttgagagtatatctgtatacccagattctctttacaaatggaacactttaataggcaaattctgtactatatatttacaattacctatttattttcttatataaaataaagaactgatcatagctacacttggttctaatagggaatgtttacctgaataataaaatgtgaaaaagaaatgttgagtgataaatcagcgaagaagcattccaagagacggtttaatggggcatttcttgcaaatattttcccctggttctggtagtttacttaacattttaaaataaaacagtagtcattgatattttaaaatgaaatggccacacatatatttagatgcatcaattacacattattattttagtcatatcttctcagagccaatagtttgtcgaataacatgggcaggaataagagactaaatttaaaaaaaggaagagtgtgtcaggtaagcatagaaaagcttttcttccaggaagttgccatgtgttatgaatgcattttttttcttttttttttttttttttttttttttttgagacatagtcttgctctgtcgcccaggctggagtgcagtggtgcaatctcggctcactgcaagctccacttcctgggttctcgccattctactgcctcagcctccccagcagctgggactactggcacacgccactatgcccggctaattttttgtatttttagtagagacagggtttcactgtgttagccaggatggtctcaatctcctgatcttgtgatccgcccacctcggcctatgaatgcatttttaaagatgtatttatgtaggcattataaattttattggatttttaaatgaaattagatatacagttccatgtactctgaagtgatctttaatattcagtcacatgtaaatgactgttttacccagatgccaagcccccattagaagcaaagtagtacacagatcagaaatttgtggattatttttgtgcaatataatgagcttttattataaatttcaaatttcttatttacataaaaatacaggacagcatggcacaccctcatgttgttgatcagattccagttcctttcttggctgaaattttgcacttcatattattgaaactataaagtgctgaacaaatacaggtttttacctgattaagcatctcctgttgagtacattcccagttcccatctaaaatatctattgattttgatgtatgcaacgtaatgggcttcctaaaaattgtttaatacatgtatatttaaatttttgttgcttttgctgatgaagcatattcataagagttaagtctccaaccctgaactctttgaggccagtttaacttggtccaagggctcaaggctgaactttgagtgactcagctctgtgagattagcaatttatccatgttaagtatctccatggaagtatattacttatatagttactgaagtgttgtttacttcactgacttctgtatccaacctaccttaaaaggagatttgaggccgggcgtggtggctcatgcctgtaatcccagcactttgggaggccgaggtgggtggatcatgatgtcaggagatcgagaccaccctggctaacacggtgaaaccccgttctactaaaaatacaaaaaattagccgggcgtggtcgtgggcgcctgtagtcccagctactcgggaggctgaggcaggagaatgttatgaacccgagaggcggagcttgcagtgagccaagatcgccactgcactccagcctgagggacagagcaagtctccgtatcaaacaaaataaataaagacgggggagggggaatttgaaatggttcacaataaagccataaaactattgaaataagggttttaaaattaggtaaaaacgctgggaaggtgaagaaaaacttaatccaagggatgtacattgttatgaaacagctctgagtttagtatcactcaaggctggggaccaaatattgaaagaattcatttcctagctgtgaccagatacagaagcaacactgagttttatgtgaggcctctggggcaatcatgaagaaaatccatatagtacaacaaaaagttgcagttatacacagactctacatgcaaccatcatggataaatgagccttctaaatacttgacaggtcttttctatagaatctacaaattatgagttaaaattttacagaaaagataatagtcattttttcattagccatgaatttgagtgtgattgttagaaagtacacgaataatggagtctagaaactagctttgagacctcatctgtcattccctatgaccttgagcaaataacttaaaatttataggcctcagtttttaatatgtaaatgcagaaattaaactgagtgctctcgaagcttcctataaatatatcattttctactttgtcagttatccatctctgttctccctgaaagtttcataggtataaaattcagtttcattactattatttaaatactataattattttttcatatagtcagttaacagctatttcttgaatgcctggtgtagtgtggccatgtagataacacagaggatataaagatatagatggcaaagcgttgcattaaactccaagtttgcacccactgaaggtccctactgaaagtttttttccagatacacattttttaatttaaaaaaatggacatttgaggaacatgtatcttttttattttttaacttttaagtttaggggtacaagtgtaagtttgttacataggtaaacttgtgtcatgggggtttgttgtacagattatttcatcactcaggtattaagcctattgcctattaattatttttcctgatcctctccctcctcccacgctccatcctctgaaaaaccccaatgagtgttgttcccctccatgtgtcaaggtattctcatcatttagcgcccacttgtaagtgagaacacgcagtatttggttttctgttcctgtgttagtttgctaaggataatggcctccagctccattcatgtccctgcaaaggatgtgatctgtttctttttatggctgcatactattccatggtgaatatgtaccacattcttctttatccagtctataattgataggcatttaggttgattccatttttaacacaggaagtaagacccacagttatctcgccattgctactcagtactcagggcctgtgttagcgctgtagaaattacaactgaagacctgatatgtgggaatgagtacaagttgaaactccctaataatccaggcatgccttttgatgtggccttggctctacactctaggaagctacaaagaccatgtgataacaaaagaattcatcatctattccagtaaataaaccagggtgttgaatgatggcccctaaacattctaatttctgcagaaaatcttgaggtggggtttttaaccatatgattctaagaatgaaatctgcccctgcttcctgcccctggaaggctgccaggctctcaccgcagaatgtggccattaaccagcactgatcctcagctaaacatccaaatgtttgtattttgttattattgaaatttatttttattccctatgacttctctgatgttttttgaagttgcaagtctttatgttttcaagagcataataaaaaattttttgagattacttggcctttgtatgtgtgacagacatcaacctcatgcagaaaagacctcaattaacctcaatcccttccttaagagattctcagggcacagttgtaacttaaatagtccatgtggtgcgttcaggctttgggacagtaataaacgacactattctccaccactcccctctaccatggccacccttggctgcctgtgaatggccttgctcccagtagtggcagaaatagcatcttatttctgtctcagccttttacataaaaataaaaacatataaacttggacctgactttcacttagcaactatttatgaagcatatatataatatgtataaggaataacagataatgtcaccaggtggatagtcattgcccacaagttaattattttctaataggaaagagcctcatacaggttgtattttgactatagcttcacatacacattactataccaaatacttctcatgaagtcctcacaagaccaaccagactgtgagttctaagaggacaagagccgctcctgtgttggtccctgtggcaccctcagcatctagttcagtacccagcatataggcaatgagaccaccttcttctgtaatattacaataattattttttacttgatttgtatataactttttcctgctgaaactgtttacagtttcctgactgtaaactccttgagactaaagactgagtccatgttattaagaccaagtccatgttattaactgtgtccacaacaaccaaaacagaacagggcacaaagttgataaacaataagtaatttcaaaaagagaataaatggtaattaagcaaggtgtttcatgcccgatttttgcagagaaaaaaaaagtggctgtgaaccagggctctttccatggtgcttagtgcagtgcaaacatgatgaaaaggaagtagatgggtaactccagcctcaccccacttccagaaatagagatctcccaagaacttactaccttctagaaacttctagcactctactttgcatctctcaaattccatttatcccccagaaacaacaggtcttccctgaaacaaggtacaattggattcttgagaaagggaatggggacaggaacccaagaacaagaagacaactctgacatcttgggcatcagctctgcagtttaacttctttgtgctttggtgaaaaaatgtaaaatgagggtttaatgaatgagagaagactgcagatcctgtcactcccaaagactatccattggaatttgcttgatatcttcaatgtctgagacaattgatttagcagctaatttggctggagagatatggaaaattaccccagggctgcagtggctcagtagccaccaatgttgagtgctaattacatgccagtggctgaactagatagtttatgtataattatgttgttaatagcctcattttagagatgaagactctaaggctcagagaggttaatgtcaccagttagcaggccaggcccacacccaagtctgtctgcctccaacgcgtggtctgcagtcatcagtgctgcgtggcctcactgcaaggactcaggctgcccctccactgccactttcatgttcttcctgacccacaaataacctaccccctttagggaacctcaatactcctagaatctataatcctctataatactctagggtctatcagagaatgttttgagtaaacactgagagaagacttccaaggtggctgtagggaaaaatctattttatcttacagaaagggaatctttggagcaaaaactaggaacataggactagaaaagtgttttcaggtctgtcaattctatctcactttttacaaatgtaatagctatgttacttcagataagtcacgtaatagctgactctcaatttaatcaccttttaaaggaaaataaatatttttcctatcctgtctattcacaagggtaacatgagataacatatgtgaaggtgctttataaattgtatggtaccatatcagatgttactgttattaacatcacgtagctgtaagttagctaataaagacaattcctgggaagaattttgaagtctatcagaataaaattttagagctgtctaggaccccaactgtttctacagaactttgaaatgctttttctttccattttttcatgaatgtctattactctctgaaattcccctttaaatctcacttcattataaagccatgctaacttcttccatctgacccattgcctcttccactaggcctgtatttagtccttactgcttcaggatccactagctcacatttgcaaatgttttgatggacagggagataatctggctgcattacctgccactgcattcatcaacagggcaacagggctgactatgttgatttgtcctgttaaatatctctcttctaccttactgctagataaatatgcttcctaaaaagaaacagagtagcagagaaagaagaactgttctttgatcaaaagtggtcaagcacaagataatttagtttgcattgtagtttttattgactccacagctaaatttaatgttctctgaatttaagaattatatttctatttaattcacttacacacacagtgatacatataaaaaatatcaataaatgtttgggcaagagaagaggtttagaaagataagattgctgtcataggagctcatctttagcttcttaaattataatttactcagttcttttgttttcaaatacttgtgatgttacttttgagtaaatataatgtgcaattttactgtatattggaaagtattttccaaattaaaatttcagttatatgttgaagaccttagacctgactgaatttgaatggaaatacaattatttatttgatgcttctgtcctaattccattttttacatttcaggatcagttaaattgatctttatccagatggtaaatgacatttgaagatgacatttgaagttgtcatttagcctttcctaacattttccattttatacttatatatttcacttaattggagcatttatattcagcatgattcaacttagaagcacttaaaattaaaaattcagaatattctacattgatctgctggctagctcagttatttaaatttgtgtagccaattaatcatgggggtaactggttaatacaattaactgttaattttttctttccttcacaaagtaacagtttcttaccattacattagccaagaaccttgaataatagtagaaataattagaccaattgcttatttattctgatatataatgagcaactaatatgttagtatgtagttgtatccactgcctctttgcatatgaagaaaagaaaaattttcatagaactttatcaagtgatccaactgtgtgtatttaggaatatctgttatatgggaagtattatctatcaagggtaaaatgtagctattgggtttattcatttagcggtatggctaagtttaaattagaataattatgttctagagtcgttctgaaagtagttatcctatttttaattctactagtgttaattttattctgtaatacatgtacaattctcagttttcccaattgccaaaatcaaaaatgaaacttaaaaaattcttggccaggagcagtggctcatgcctgtaatcccaacactttgggaggccaaggcaggcagatcacgaggtcaggagatcaagaccatcctggctaacatggtgaaaccccgtctctactaaaaatacaaaaaaattagccaggcgtgatggcacgtgcctgtaatcccagctacttgggaggctgaggcaggagaattgcctgaacccaggaggtggaggttgcagtgagctgagatcgcaccactgcactccagcctggcaacagagtgagatcccatctcaaaaaaaaaaattctttcagttagtttaactccttacactacagcctgttctttgttaatttaatgtgagattatagataaaattattactactaaatgtttcattgttatagtatatactttccattttaaagcctgtgggaaggtgaaaggtgggagaaggagaagatcaggaaaaataactaatggacactaggcttaatacctaggtgataaaataatctgtacaacaaactgccatgacacaagtttacctatataacaaacctgcatatgtacaactgaacttaaaataaaagttaaaaaaaattataggtattcaaacaattcaatgctatcaatgattttaaaccacagcttctacaattctgagatcatagttttaactaatctttcattgattagataatacttgacatgatttttcaggaaaaagcttataaatattttctgaacctttgtatttttgaaaatagcctttggttgatttcacacaggaatggcagaatgaaattattgagtcaaaaaaatatgtcttattatatattagccctggcattcattttgcaatggagaagtatgagatcagtctgacttttattcctttgtaggtcagattattttctctctacgtatttatggatatttttcttcatcatttatattaatctgagttccccagtgggaaacagaattcacccaagatggttcaaatgaaaagagattattactcacagcagtatgggcaggattatgggaacaaaccagggctggcaaggcattcagaaaaatcttgctactcttggaaaccatcaccaccccgagaaatgaagacatagctgaggaaatagtattatagaggccagtgaaaactaacagttgagtagggtcctcccagtgggatctatcgcctgaaggggacttagctactgcctaaaaatgtggtgttgtaaaagaaaggtagtgaggggaaatactctgaaccatctcttctcccaccttccacctgtcagcgtgcctgccagtgccttctattggccaaacccaaggaggagtcaaccgatggggagaaagcctgggtaaagtttgcagaagtcagcctcctggagcacagagcagggcagagaaggagcaagcatgaatctgggtagctaaagaagaatacccggttcagaaataccacctgggcatatctaggtgatggtctttgtttataacatgtccagaacatacagaccttttactctgaaaattaacacttgtgtgttcattatttcagaaaagctttcttgtattatagatttgataatcatatgtgctctattttttcttcttagcattttctttgctttgtattccttactatcttctcatcctttcattttttaatccttttcctctgtggccttagataattttcaagtttgttttcaatattatggaatcaattttctgcgatgtcagttgtgctccttaaagacatcagtgcaaaatttcattcttgtgttgaattttaaagacctttttgagttttcttattcctgacagcttcctagtcttcagagcttcatctcccgttatgaccttcttgttagttcatagaggccatctttgttatctttttaagggtacaatattttctaacgctatcttctgtttctcatagcaaatagttttcagaaatatttgggggatctttttctttttttagctgactttttaaatcatcctgatgcattttacttttacagctttgaggtttgatttacataccataaattcacttaattgtacaatttaatggtttttagtaaatatgcaaagttatgcaaccatcaccataacccaaatttaggacatttccatcacttcataaagatctctcatgtccatttgcagtcaccttctgttcttagctctaaccccaatcagccactaatctatttttggaatctatagcttttattttctgaatatctcatataattacaataataaaatatgtaaccttttgtacctggcttctttcacctagaccagtgtttttgaggttcatccctgtagcgtgtatcagtaattcatttctttttatttccaaataatattcaattgtatgtatataccacattttgtttattcattcagcagtttttggacagtggatactttataattttataaataatgctgttataaacacacacatgcaaattttcgtgtggatatatgttttcatttctcttgggtagatagctaagattagaatttgggggtcatatggtgaatttgtgtttaactttttaaagaaactgccaactgttttccaaaggggctgcaccattttacattcccaccagcaacggatgaggattctaatttatccacacccttttcaatactgattgtatatcttttttattattgttagtccactgggcatcaaatgatacatcattgtggttttcatttgtttccctaatgatgttgagtatcttttcatctgcttattgtgcactcatatatcttattttgtgcaatatctattcacaatgtttagcctatttttaattgggttttctacttatttttgagttccaatttaagctctatctgtattttggatataagtcttttatcagatatatgatttgaaaatgttttcttcttaggcttgtctttttagtttcttaatagtgtcttttgaagtgcaaaagtttgcaattttgatcaagtccaatttgtattcttttgtttcatcacttatgtttttggtgtcgcatctaagaaatctttgcctaacctacaggaagattcacttcaatgttttttcttttcctaagactttcatggatttagctcttacattcagatctacaatccaatttgagtcattttcatgtatagagtgagtcgggagtctaaattcatctttttgcatgtggatctcgaattgccccagcaccgtttgtcgaaaagactatcctttcctcattgatttgttttgactcagtgcaattttatcttcttttttcctttttctttctcttagaaaatatcatcattgaatgtcaaacattctttatacattcaatgttggctttagatactcactgtgtggctttttttcttagttcctctcactctccatttgctattagttgccccttctcagagccaagatatagaacagcttgacgtgcacaattccagctcaattactgatgatagtaaacattcagctagttctggcctgtttgaagtaggaaaggctgctactgcagcactcaggtacactgactctgagggagacatatcttagaaatatttgaagaagtttgtagttgttctttaactacctttaatatatgaaaaagaataaacctcaacatgggtgctcccaagtcttttctacctatgtttcttcccctgaatgtttggataaggaaagaatatatctcataattgattgcacagctagtcacctagctctttttccttgcctaattcctacttgtttgaatatttaaccaccagagagctacagtattgtctgtgcagtacttatgcatgtactggggaaaatatgattggggtgcagaagttttagctacctgattgattttttaaataactttgttgaatcatattttacatgtaatataattaatccatttccaatggtacaattcagtgattttgtagtaaacttccacgttgtgcaacaatgactataaatcagttttagtacattttaattaccatagtagtgagattcttcatgcccatttattgttaattcctatttcttccttccctttgactacctccaggcaattactaatctacttcttttatctatgaatttaccttttctagacatttcatataaatgaaattgcactgtatgtggtctcttaggtttggcttcttttacttaacatagtgtttttcaagttcatctgtgtcataccatgtatccgtagttcattccttttgtaaattgccaaataataccccattgggcaaatatcatattttatctattcattcatctgtgtcatatcatgtatccatagttcattccttttgtaaattgccaaataatattccattgggcaaatatcatattttatctattcactcaccagtaggtggaattttgggttgtttccaacttttggttattatgaacaatgctgctaggaatattactgtgaaagtccttggtggatatatgtttttatttctcttgagtatgtacctaagattggaatggctgggtcatatggcaaatttacatttagccttttaagaaacaggatttctagttttcattggtctgcatgtcaaatccttctgtttcacacattgaaggccatacattcgatagcttatatttcttgtttgaatttcactgatgttatttttaaaaaaaaattttctcagattctggttaatgcttgactaccatgttagtttttgatattactgtgtttacgtttttgtcttggccttcagatatattttaatcagaagtaaatgatagctttatactatattaactcagaattctgtcaatttgagtaacaatatgaacagggtaaattttctttaaaaaatattactttaggaaataagtctggttcatctttgattactttccttaacttcattaatatgtggaatattttattcctgtggcagtggtatctcatgctcttgtgtacatgcatttatttcccccagctagttttttgtattttagtagagatggggtttcaccatgttgtccaggctggtctcaaactcctgagctcaggcagtccacccgcctcagcctcccaaaatggtaggattacaggcgtgagccaccatgcccagccgagagtgtatgtcttaatattcaatttaacccagcgttgccatgccataatctagacccaactttacccgttcttcaagtgtttcaagtgaaactggaaatttggatttttcaaatgtaaatggtttacatttttaaatttggtaactaattccaaaaattttaaagtgtaattgtgggctatcacatttaacccagtccaggaattaccctcagaaaagtgcttctatatcctttcagtgcattttggaaattaatgaatactctgacctttaaatttgtattatgaaatatcttaaatatgtaattgtgtaaagaataattttaaaacactcatgtaatgcccaccccttagtgtcctgccatcttgtaatggcacattcaagcatatttcttacaagattctaatcctgatagaacaatgttgctaatttcactgcattaatgagttcgaagctggttgagatgcagtgtagaatagactggacagctcatcctttcaccttataaatgttggccacagttttttttctttgcctgaattataaacaaaggccttaaggaactctggtcaccacccagacataattttctaagtgtcttttaattactcaatgcaatgatggttagaacccaatccattaacaagagtaaattagaatacatctctgcatttgttgttgtcatccatagtttaataaacatatctttactgtggatctaagatataaaataattttttttttttttttgagatggagtcatgctctgtcgcccaggctggagtgcaggggcttgatcttggctcactgcaagctccgcctcctaggttcatgacattctcctgcctccgccttcctagtagctgggactataggtgtccaccaccatgcccggctacttttttgtatttttagtagagacggggtctcaccatgttagccaggatggtcttgatctcctgacctcgtggtctgcccgactcggcctcccaaagtgctgggattacaggtgtgagccaccaggttctcagattttttaaaactctaagctgagaaatatcccagtcttaaatccatttgcttgggtggagttctctgaggcttttgcatggtgccaaccaagtataatacatgatatattaaagaagcacttaccatgttggctttgattttttaaagcaaggtggtcttgctttgtgatcagtttattattggcagtttgacagaccctctaataacccataccctgctccaaaagaaggttctacaatgatgaaagagttaattgtatcataaactacttcactggtagccttgagtcccttgatgaatcccagagaagcttagaaaatacagaggccaattcttcctaaggatccaggaaatattttgatcatatgatatgaactacataatgcaaggcagcccatatggagttctaacctgacttttaaaggggatgttttcacaaggatcttgtaggcctcaactgttacagttttttgtcagtgctatttcctccagttctgttgtaaccacatcccattaacaagagaagcctctatttttttttcttctttctgatatcctatggtttttaagctctcttatattttctagagttaagttcagcatcttactttctaagtttctgatgtacctaaatttcactgtacacttaaattggtgcaaaagtaattgcagttttgccattttaagtttaatgccactaatagttacaaagcatgggttccaatttaaagacatttaagctttattaccaaataatacactaggaaaagggcagatatgttctaaagtaattcctggcaccaaagaatggcttaaaaagacactgtacaactgaagggccatgcaaacctatttggccctgtgaagataattctgattcccacaccaaaaaagacttaaaagtttcctcttttattggtagcctggttcaagggtatgctctacaaattgactcattaatattccttaacgataaagaattcacataactctgtcgtcaatctgagctctgctgtaggtatctactttatcacatgggaaaagaatagaggaactaggaaaaggaaaatttattggattctttaatttaaaaaaataaaacaaaataataccatgatcacagctattttagtttggcattgtatcagtttttagagcagaaaaatagttttctcagcttttaaaatttgcttttatttaggcattcactggagataggatgaaataagtttggcagcctcataactcaaaagataggaacggtacctggccttatgggatggagaaagggtttagctgtctagcagaagagggctggctgatttattggcaaattcaggtctctgccttcatgacataaacatctgtatgccagatatacctcctcacctctgacatgtgcctctatgaccatctttagaagggagtcaaagtgaaaaatccaggacttttaaaatttattattaccttctggaaacaatttccagatttaaattgccaatcaactttccttcccatatcttccaacattatttattagaatcaatgaattaataatgcttcttttcttcccttctctattcttttctaaagtctggctttttaaactatcactgtaagtttggaaaatcgaatccttaaattaaaattgataattttctgggtatagttcactttgtatttgtgcttcaactctgtaaatttacataagtaggaaattttggaatatttaaagttattgttcttctcttgcctaggaaaactatagaaacagaatgataaacaaagtttgctaaaactaagggtgggatgaacaaatataaatcagaggcatagataaaggcattgtgaagatgtatatatcacttcttcctaaaaatgaagaataaaagctaagttcaaatagaagaaacacttcatatataataagcttaaatgttaggatgaaatttattagcttttaactcctatatacctttggtgctaattgaacacctgctattagtaagggcagcatctgcaatttagaactggaaaagtgaactttaaaaataatttatttaagctcagtttcattaaaaaatttttctgggggctgggcctggtgactcaggcctgtaatcccagcgctttgggaggccgaggcgagtggatcacgaggtcatgagattgagaccaccctggctaacacggtgaaaccctgcctctgctaaaaaaatacaaaaaattagccgggtgtggtggcgggcgcctgtagtcccagttactagggaggctgaggcaggagaacatcgtgaacccaggaggcagagcttgcagtgagccgagatcgggccactgcactccagcctgggcgacagggtgagactccgtcttaaaaataaaaaatttctggaatcaaaatagtggcaaaggcaggggagaaataaaaacaaggaaaatacattaagctttatttttcttgtgtttgataaccttctcaactcttcctcttagccttttacattctttttttttcgcttttatggaatttgaatacaggatattgtttataaatctgaactaaatttattagcctagtgtattttttaatcccggggtgaagaatgtttggtagatgtgtcagtggatttttgctgtgtagcaaaccatcccaaaactttgtggcttaaaacaacatttatgtggctcataattctgtggtccattctggtctcaggtaggtccatgcatgtatttatggtcagataacagctagaaggctctgcattgaggattaactggctgttcactagggcaataggagcatctgggccacatgacttttcatggagcaggccagcccagacttaaaacacagggtagcagatttccaagagagagtgagcagaattgtacaatctctcaagggtagactcagaaccagcacgccatttctgccaacagattttacaggtcaaagcaagtcacaaggccagttcagttagaagaggtacggaagtagagtccatcttttttttttttttttttttttttgagacagggtcttgctggagtctagggtcacctaggttggagtatagtggtgggtttatagtttactgcagcctcgaactcctgggctcaagctatcctcctggctcagcttcctaagtagctaggactagctgcatgccaccatgcctggctaacttttaaaaaatttttgtagagataaagtctcaccatattgcccaggctggtctactcacatattcccatttataggcctacctcagagatattgcaggttctgttttagaccacagcagtaaagcaagtcacactattgtttggtttcccagtacatgtaaaagttatgtttatactatactgtagtctgttaagtgtgcaataacatggtatctaaaaaaagtatataccttaattttaaaatactttattgctaaaacatcctaaggatcatcttagccttcaacaagtcatcatctagttggatggcgggtcttccctggatgttgatggctgctgactgatcagggtggtggttgccaaaagttggagtggctatgacaattccctaaaataaggcaacaatgtgatttgccacgtcagttggctcttccttttatgaaagactgccctgtagcaggcaatgctgtttgacagcattttacccacagtagaatctcttaaaatattggaataaattcttgcaaaacttgccactgttttatgaaggaagtttatggaatattctaaactttttgttgtcatttcagcaaagttcatatcatcttcacaaggaatacagttcatttcaagaaatcacttcctttgctcatctataagaaacaactcctcatccattaaagttgtatcaggagctttcagcaagtcaatcacaatcaggctatacttctagttctcttgctattgtcaccacatttatttcctcaactgatgtcttgaacccctcaactcatccctgagggttggaatcaacttcttccaaactcctgttaatgttttgaccgtctccaatcaatcatgaatattcttttttgtgtgtgtttttgtttgtttgtttgtttgtttgagatggagtcttgctctgtcccccaggctggagtgtaatggtgcgatctcagctcactgcaacctctgcatcccgggttctagcaattcttctgccttagcctcccgagtagctgggactacaggcacgcatcactacactaggctaatttttgtatttttagtagagacggagtttcaccgtgttggccaggattgtctcaatctcttgacctcatgatccacctgcctaaggctcccaaagtgcttggattacaggcgtgagccactgcgcctggcccaatcatgaatattcttaatggcatctagaatgccatttctttccagaagattttcaatttactttgtccagattcatcataagaatcactacctggcagctatagccttataaagtacatttttaaaataataagacttgaaagttaaagttactccatgatctatgggctgcagaatggattttgtgttagcaggcatgaaaagaacattagtctccttgcacatctccatcagagctcctgtttgaccaagtgcattatcaacgagcagtaatcttttgaaagggatcctttcttctgagcagtaggtctcaaaagtgggcttaaaatatttggtaaactgtgctgtaaattgagatgctgtcataaaggctttgtcctttcatttatagaacagaggcagaataggtttagcataattcttaatgaccctaggattttcagaatggtaaatgagcattggtttcaacttaaaattatcagctattttggcacccaacaagaaagcctgtctttgaagctttgaagctaggcattgacttctcctttttagctatgaaagttctagatggcatcttcttccaatagaaggctgttttatctacattgaaagtctattatttagtgtagccaccttcaccaatcatcttacctagatcttcccaatagcatgctgcagcttctacatcagcacttgctgctgaaccttgcccttttgtgctatggagatggcttctttccttaaacctcatgtaccaatgcccactagcttctaacatttcttctgcagcttcctcacctctcttccttcactttcatagaattgaagagtaagggccttgccctgggttaagctttggcttaaggggatgttgtgggttgtttgatcttttatccagaccactaaaactttttgcatatcagcaataaggctgttttgctttcttattatttgtgtgttcactagagtggcacttttaatttatttctagaacttttactttgcattcacaacttggctaagaggcctaggtgtttgtcacaagaggcctagcttttggtttatcttggctttggacatgcctacgtcaccaagcttaattatttctagcttttgatttaaagtgagagacatatgactcttcttttcacttgaaaacttagaggccattgtagggttattaattggcctatttcaatactgttgtgtctcagggaataggcctgagagggagagagatgggagaacagccagttggtggagcagatagaacacacaccacatttaagttagccaatttatatcagtgaagttaatcgtgccccaaaacaattgaaagagtaacatcaaagatcattcatcccagattatcataatggatataataataatgagaaagtctgagataatgggagaattaccaaaatgtaacacagagacacaaaatgagcacatgcttttagaaaaattgcacgaatagacctgctcaatgcagagtttccacaaatcttaaatttgtaaaaattgtggtatctgtgaagtacaatacagtgaagctcaataaatcaaggtatgcctgtgctttatatcaactctagattacttatgatacataatacaatgtaaatgttatgtgaatagtggtttttactgtatcatttttaagtttgcattattttttattgttgtacttaaaaaaaattcaatctgtggttggttgaatccacagatgtgaaacctgtagatacagagggccagctatatgtgatatgtcctgttttaaatacttttcagctcatacaattttgactctttagtctttttgttgaaaagcctaagacatttttatttttccagcttctttccattttatattccagctttttaaaggtctacttttaaagtagaccttttcaaatgggcttttgtttacctgttatcatttattgacttttagtaacgcttccaaaacaaatctaggtaagaaataaagctacagtggctgtttcctcattgaactgacatagactaaacaactactttgtgtcaggtatatttctaagagcaggagctataacagagaccaattctaggagcctgctcttgtggagctcacattgcagaatgagaaaacagacattgaaacaaacaaatatacaagtcagttggtgagattagaggagctatggggaaaaattaaaaagcagaattaggaagacaaggaatatgcaaaggaagagaatggccgaaggatttgctttttgatatgaaatggcctgggaaggtctctcttattaggaaccctgaagagactatggaagtgggtcatgagagtatatgatggaagaatgttgcaggcagaggaagccataatccaaaggccccaaacaagggcatacttggtatgtttgaggaactgcaaggatgcctgtgacactagagcaaagaaagcagtgaggagtgtggtgggagatgaggttgaagggcttgtttgggatgtgggattggggggtggggtgaccacatagagtgggctggtagttgacagaaccagctacacattctagtcactctgggagctttgaaaaaatgtctgggcccaatcccaaaatctgttttaattggtctgggttgaaatctggtcaagtctttataaaacattaccagaataaatccagtgtgtagtcagggtctggtataccttagtaaagcatgactctaactcagtgagatgggaagccactgaaagattttgcacaggatgatacagcttgatcaccctggcatgtgcctcttcttcacccacattcccctctggaccttaagatcatgccttagtatgaagcttgggatcctgcctcacccttttagggaagagagtgaatgtggtcctaagtaagctctctgggcacttcacctgttctgcctctgccagtctgtctgggtaagtgtcaaggatgtaatagaaggaaaagaggaagacttctaggaacaagagcccattctgtccccttccaagacaagttggagacagagcttctacctttttcagtttccttccagcaggcaatccctgggcctccctcccagtgttaccctatagtcacagtatttacagattgatttaagaaccagtaagtggtgtatgtcacttctgctgatccctgtgttgaaaatattaaaacttctgcacatgtgtcatatatgtaacctagtaccccaaaccttgctgtcacgctctgttaccataaaggatatgctcagaaataatataagcctgctatctaaattgcacctttttctgtcgaagtaacagtataatgtagttgttcagagtgggaactctgaaactggctaatttgcatcctggttctaacactagctagctgagcgataaatccattgtgtgcttcagacaatggtgtcaataagtctgttgtcagtctgaatgagtagatacatataaagtgcttagaaaagtgcatgacacatatttagggctcaaaagatctaaatattaatgtctctatagtttccttcttgatttaattaccacacaaatgaatctctctttaattttatcaacagcataggagacttctatatgcataatatgtcttttggtagcatgttaggcacattcttctctgtggtttaattgctgaaaacataaagatgctacatactaagtggagtaaattttaattgagaaaaggaagataatctcaaaacatttttagaaaacaaacaacccattttatatcattgctgtgaaaaaataattactggcaaaactctctaattcctggccttctcatgatcaaaaaaaacagcagcctcttttggacaagctgaggctgggaatgtaaagaattaagaagtggacaataaatgttttcaacgtatttatctagagaaccatctagagaagtgcctgctttgccagcaaatatgaaaatctgagatttcattgtggcctccccaactgctcccctagcagaggttacaagatttagtggatgatggtgggggaggatgacaaggggggaggttacacagtttcatcctcacaggaaagggactacttggactcacattatttctctaactttctgtatccatagaaatgtctcatctttgtttcataggattcagaaagttaacataaacttactggaatatgaaaatatgaaatatttattgaaaatgcaaatgtgatacttacacatagtagcagccctaaaggcacctgaaagctaatgtatctttattcaaggggaaggctttacttcagagctttatttgagcttaacactccacctgagtgatatttaaataaaagcaaaatagaaaatgcctcttaggaaagaatgccctaatttcagcattgctcttatattaatttagaggtctcattttaacattgcccacaggataaagtctaaatttctcagctgcacaagctgacctcaatcttttctgcatcttcttttaccccatctctacagtggccctacctccatcacttcttttcaggagttagtgcatctgaaaggcaaactcattcctctatatctttactcctacaacagtttgttcagttttatttctgttgaaattttgcatatccttcaaaagtcagttctcttgaatgattttctctgattccccagatctggaattagagcttcttcctttgccctctcagtccctttttgttcatttattgccctgagttagttctgcccactgtttttgctaattgcatcctttttatcattataaacagttagctctttggggaaagagtacaatatttcttagtcacatgtgtttggcatatatacagtaccacatatagaccagaaactaaatacctatgaaatgaatgaaacacaaagaccaaaaaacatttccagaactagaacatactttcccttgaaacccctgcatgtaacatctttatctcacagcgatttgtactgccacccttgtgtctttgtatatctctatgacagtctaattatgacatttcttgctcaataggagcatttagtgctccaagttgaccctaggacaataatttgacctgaataagataaaattcaatctttattcaatgtccttcaagatctgacttatgccaccagcaaatctcatgtcactcctctcctctcactctgtaacacccatatggaatttctgtcccagaaatggtttttctatgtggaatgcctttttttttcccttttcctcctcttcatcttccattggctaactactcatgcaccagattctagataagatgctactcattttggaaattatccctagctccccacaccatctctagccctagattagataaagtctttctccttagtgatctaatagctaacagttagatatgagaaagacttgggtcaaggtctgaagttattgttaccaactagtaactttagacatttgcaaactttagcttattaaatcatagatcactgggcctcatcctcagagtttctgaatcagtggttctgggatgaatctcaagaatttgcttttccaacagctttctgggtgacactgatgatgctgttctgaggagcacagagataactgatgcttttgataatttattcatctacttctgttacccctgtaaactttagtttcagcacctgcaaagtgaggctaaaaggagtgtttaaaaattagctgagataatgtatgtgaaggggttgacatgaattagggctcaatgacagttaatattgttcttgtattatcattgctttcataacactgtgttgaattccagactgaacagatcatgccaagtaagctgagaacccccaaaagagcaaagatcacattggtttcattattattgtgtcacaggtatgttatgaagtgcattggtagtcactaaataaacacataattgagtgaattcaaatacaagcattcaataagtatttagtgaaacaaattcaacgcttcttgtaggcagcccctacctagaatgttccaggtttcttagtttagctcactttattcttggtattcttgggactgttttgttgattacttcctaaattactttttggttatggtgagtcagtccccaagctttcctttctaagaagattatacaagcaacagaaagaacttcttcctgtaaagaactagaaatgaataaccacgtgggctattcatttgtctgtgtagtttcagtttcatactgaatgaaagcagttgcaccaaagtattcccctgccttctgtgcttgaacgtatgcctttacttaacagtggatatgggttagaaattaacatgtgaagaatttaattttcatttctttgcgaatttatgaagactcctgtttggaaaaggcttccctatttttactgtcagtctatacccctgtccttctctttgacctcagaacctcgatttggtattcatatatcattagttcagcaagtatttttttcaccacctgccatgtggcaagcactatttttatggtggtgatgccacactaaatcaaaacccctgcttcacagaacctaaagcatagcatttatcaatttgcactgtaattgtttgcttctctgtctcctcccctgctaagtttcagcttcctgatggtagatgcagtatctaatcaaactttgagtctccccctcaatgtgtagtatatggtagacagtcatacatacggataattattgtttacatacagagacccttcttcttatattggtgtgagaaatggaactgagcaccagagatcatattacgcttgtccttgaaacagtttggcactagctgtgtattctttgacttccaaagtgttagtttgaattttaattaggatcagccagtaaaatgtgggagattttacataagaatccagattcccagcttctcttgtaaaagcccacattcctgtatcacacaatgagctgaagctgtggctggtccacctgtttcttgagatggggcatgccttctccatttcactacaacccctaccatgccctatcattttgcacgtgtcgaggaggagcaagggggtgatgtgtggtgaggggagaatgaagtgcttccgattctacataaattcactgaaagtgtgtgttcataagcttatagcaacctaactcccaacattggaaataataacttactttttttccttcagtgatgtggaatgctaacaagcatttgtttacatttgaactatatatcatattgagtcaacaatcaattttgtctgttgtttttctgcattttcacagtaggtttcctgtatttctcaaattaaataattgccagctacattctactgtgatgtgtatcctagtccaaagtaaaaatatatctaaatctatctggtttaggattttttttcctccttttatgattattgaactaactctttttatttgtcttggttttgtcgtttgagactagaatacttaaaaacataaaattgaattaaaattatagtttatccaactaaatatattcatgctttgtttcagttatccttaaaaagaagaggaagcaaagatttgccaaaatctgaaaaaaaggctcaacagactcccacagaggtatgtggaaataaaatttcaactagtacaccaagtacctctaagtgtatataatcacaaactacatttataaatagatataatggccagataaacttatgcaaaacaaagtcaaatttgcatatcaattatgtagctgtagatacaggtagtataaatcagaatatttacttataaagccaaccataacatccctattataattgctttacattgtaagcacacagaaaaatgtcattcgtattttatacgctgctatatttgagaactatactcatgatgctaatcttgtccttttataattaataaggtcaatagaaaggctgttcctatagtgtcaggagaaagtaaagaaaggaatgttgcagagggaagtcagaaaggagagaaaggctcattatatctttagagagccctggaatgaagtaattctccataccagtgattggagaagcaaaagaaaggagacaaaagaataaaaatgaaagttgaaagatgtactcaacatgggtttgttaaaaaccttagaagcacagccacagtaaagactagctttgctttcaaggtaaaaagaggtgccaatggttgtaatgaagaagattttaaaatggaagaggaaacatttgggataaaaatgacactattgttaaggaaggggatcccaatccagaccccaagagagggttctcggatctcgtgcaagaaaaaattcagggcgagcccatagagtaaagtgaaagcaagtttattaggaaagtaaaggaataaaagaatggctactccataagcagagcagccctgagggctgctggttacccattttatggttatttcttgatatgctaaacaaggggtggattattcatgcctcccctttttagaccatatagagtaacttcctgatgttgtcatggcatttgtaaactgtcatggcactggtgggattgtagcagtgaagacgaccagaggtcattcccggttttggtgagttttagctggcttttttactggaatgcgtttcatcagcaaggtctttatgacctgtatcttgtgccaacctcttatctcatcctgtgactcagaatccttaaccatctgggaatgcagcccagtgggtttcagcctcattttacccagctcctattcaagatgtagttgttctgggtcacacgcctctgacattataactctccaaaagcacttggctagatattaacctttaaactatgtcagttggaatctatggtactgtagtatacttttgtgattacaaggtttttttcacattagatagataatttaactaaagtgattttaaatattcaaaatttgaaaaagttgatctcagacattttttaaagcataacatattaactatatattattttcctttttcctctctgtacctgctctgttcctgctctgttttctcctggtacttgcaccagaacatgtatggacctcagcatttttagaatcccagagagtctcacagccaagaccatgatatcattttttgtacctttctctctgttcccttagtaagtccaaatatactctgtcactacagcttttccactctgtctttgctgtcactttatccaactcactctaaatattttgttgtgaatcatttcacgtgttgccatgaatcttctttcctaccttgtttatggagtagacgctgtatctacatttgtcctattcttacacttcctgtgttaaaagtttatttattcttttcaaccatagtctctgatgcaggaattcttaactgtttagtcttggctttatggacctccactcactatgcatgtgggcaactttctgcaaaaacatccacaactttaatcagtttctcagtgaggtcagggaccttaaaaaagtcaagatgctatgcaatctaccagcttttatttcatggacaaaaacttccttttttataagtatactgtagcatttgaagtttctgctatcatttccaacacatttattttcagaggttatgacctgtcacttttaaaaaacccacctcaggagactgatcaggctatctctgatgggatatctcaattataaaatggtcaatttttacaaaattataacacgattccaatgctcagtcaaggttgcaaaccatcgatccacatatttgtattactgaaaatataccattctattgtaattcttgtttatgcattcatctctcctacttagccagggcatttttgtggacaggagccatcttattcagctttgaatcatctgtgtctagtgattggcactctgcacatgttcaatacatgcttttaaatactcccatgtctcctttttctatgcgaaatcacacaaaattgccaacatgctattgaatttgatctacagaagtggcaatttcatatggtccaactctctattattcatttagctttgtatttcattttgttaatttgcttcagcttctttgatctctttctcacatgttcctccagcagcacagtgactttatttacagagaaatgatactgcacagcaattaagaactgtagctctagggccaggctgcctaggttgaaatctctggcatataccagctgtatgaacttgggcccattacttattctttttagtgcctctatttcttcatatataaaatgggaatcataatagagagttgttgtacaaactaaatgagttaatatatgtaatcgattagaatgcaatttagtttctagtagtggctcttaaagtgaaagccaggagtagctcatttcttactggccttcatcatcatcatatctttatgttcccctcttcacatgtaatttgtatcttcaattgagtgagtctttaacatacacaaaaataagaaataacttgcttcacacctcagagcattttaatttttcttgcctacctttcactgtggaaaataggagaaagtatttactgctcaattactgtggaccaggcactttgcatacaatctcctttttttatcaataattatgtatgatatttctatgccaagtttccaatgcagcctacaatagttgggttacaagatcaggatgcaaggcatattggcatacagggtggtaaactcttggcattgcagaaactagcacattttgtatcttgaaaatatttatttttaaataaataaaataattaccatgaccattagcccttgatgcagctctttccctcctaatgactctattatattcagtctatgtccaagtgttaaaataattgttgttttcattcctttgggcaggagcgcttacatacacacaaatcagatattctcttttttatttgcttaatataacccagtgaagtgttattctgcttcagtgtgtgccttgtatcacacccactgctgttttggttagattcaatttgcagtatatgccaactatactagcaaataaaggccttgccttgcaatcaaggacttccaccacatatgcaaccctacctggcttcccagtctcatctactcttgcatgtcaaataaaacctagcctatgtaaaagcatatttgacatttatttgtgctgataaaatgcgttccagtaaaaaagccagctaaaactcaccaaaaccaagatggcaacgagagtgacctctggtcgtcttcactgctacaatcccaccagtgccatgacagcttacaaatgccatgacaacatcaggaagttaccctacatggtctaaaatggggaggcatgaataatccaccccttgtttagcatatcatttttggtcatgtttctgttcaaacattgtttctaattattggcctacatgaccttagatttcccctcccaaacctttgactatttcttacctgtctccccctttctcttttttttttttttttttttttttagatggagtctctctctgtcacccaggctggagtgcagtggcgcaatctcggcttactgcaacctctgcctccggggttcaagcaattctcctccctcagcctcccgagcagctgggactacaggcgcatgccaccatgcccagctaatttttgtatttttaatagagatggggtttcaccctattagccaggctggtttcgagctcctgaccttgtgatccacccacctcagcctcccaaagtgctaggattacaggcatgagtgaccgcgcctggccatatgtctccctttcttttcttctcctcattggttgtgtctgtgaccattatgataggttcaaccatcacctctacacatctcatccacacgtcctcacttctagacctgagctctaagtgccaagctgtaatcttagtaatctaatcatgagcctgagattctacatgactgttgatggatgtttccaccctgtatccctccactggaacacctcacagacagcattcttaaaaccttaaacccacattcttcacccaaaaccatttccatttctccttttgtacttttcaatttagttaatgactgggctttgaggttgtcatgagaatgtcgtgagaatgtttgagaagaacttctgtaagtttcattccactgtcctttcagcaggcagaaccaactttatccattttagattgatgggagtacatcctattttgaaagcgatctaaatggaatgctcctctttattcattctctatccttgctattggccatacaatccaatgagacccctcaactcaaaaattcagggtcatctttgattcctctgctgatgtgatccaaaacattgtaacatgtccttggtctcatcctcaaaaaatcttccatcaaagctttccatgacatgccctcttctcctctctggatgctgctaaggctctctcatctcttctggtagtccttctcttctttcttctaaacctctcctagaggaaagtgtacaaggcaacacatcttacttctttgattttaccacattgctctatttttttttcttttatgcttcttttctagaggcagcatgtgcagtggaaggaatatgagtttgggactcagccagaatatagactgtgctctgtcacttattaacttgtgcactgcaatgttaataaatctcccctatcggtaaaggggagatagcatcacctatcttgaaggactgatataagtatttaatactatatggaatgtaatgttcaggctctgcacacccagcagctctcaaacccttcatattcttcatattcccattagtagataggaagacagaagacctgtgccctgttctccatctcttccatctcaaaggctctgtgtggtatttactgagcatctctggcagaagctcattattctcctcaccttctcaccagtggttgctccttctttaccagaatgcatctcaaacacagatgaccgagtactggataaggaaagaatttttatttttgtttttttaatgaagaaaccaaagttcacagaagttatatgattggctcaaagtacacacttaaaagagaattttgagaaattgtccttgggagaaatgaccttagacataataacatgcttcagtaatatccctcagagaaagatttccattcctccttttgtacttttcaatttagttaatgattgggctctgaggttgtcgtaagaatgtgtgagaagaacttctatagttccactattcttttgccaggctttatccatttcagactgatgggagtacaacctattttaaatgtgatctagatggaaaacttaacagtttctccttggatggaccattccaatgtcaaactttgctgacttacaggcctctaaaacaattttcctttgaataaaaacagggggcagattatttcctaagtgacacagaaatcaagagcctgagcatttgtttcagacagaactggattcaaatttcacctttgtcctttgctattcattagctgtgtaaccttcgaacggttactgaacatctttaaaccaggaactgtaataactactcctaagtttactctgaatattaaattaggttcatatttgtaaaacacttttcagcacttggctcagtgtaagtgacaaaaaagtggccgcaaatgcatatgaaccacatgctcgttgaacagattttatatttattactgcaataatgaaacaaaagaaacactgctgaaatgatcaccaaacagttgtatgcagttacaacatataataatctctgaatagtgatgccacagttattctcttttcatattccttttcctttttgcttccaggatgtaacattgttctaatctttaatttgccagagaatttaagtgatctgaagaaaatacacagtatctgcttctgtttctctctgtcattaaatctggattgcaagaaaaattatttatccaggtgtcctcttttggttgtttccttgatttacataaaaatgatctcctatccttttccctcttttcccccaaatgaggaggacaatgaagatctgaagtgccagctgcagtttgttaaggaagaagccgctttgatgagaaagaaaatggccaagattgataaagaaaaggacagatttgaacacgagctccagaagtacagatccttttatggggatctggacagtcctttgcccaaaggagaagccggaggccctcccagcactagggaggccgagctcaagctacggctaaggctggtggaggaagaagccaacatcctgggcaggaaaatcgtcgaactggaggtggagaacagaggcctgaaggcggaactggacgaccttaggggcgatgacttcaacggctcggccaacccgctcatgagggagcagagcgaatccctgtcggagctgcggcagcacctgcagctggtggaagacgagacggagctgctgcggaggaacgtggccgacctggaggagcagaacaagcgcatcacggcggagctcaacaagtacaagtacaagtccggcggccacgacagcgcgcggcaccacgacaacgccaagaccgaggccctgcaggaggagctgaaggcggcgcgcctgcagatcaacgagctcagcggcaaggtcatgcagctgcagtacgagaaccgcgtgcttatgtccaacatgcagcgctacgacctggcctcgcacctgggcatccgcggcagcccccgcgacagcgacgccgagagcgacgcgggcaagaaggagagcgacgacgactcgcggcctccgcaccgcaagcgcgaagggcccatcggcggcgagagcgactcggaggaggtgcgcaacatccgctgcctcacgcccactcgctccttctacccggcgcccgggccctggcccaagagcttctccgatcggcagcagatgaaggacatccgctcggaggccgagcgcctgggcaagaccatcgaccggctcatcgccgacacgagcaccatcatcaccgaggcgcgcatctacgtggccaacggggacctgttcggactcatggacgaggaggacgacggcagccgcatccgggagcacgagctgctctaccgcatcaacgctcagatgaaggccttccgcaaggagctgcagaccttcatcgaccgcctcgaggtgcccaagtctgcggacgaccgcggcgccgaggagcccatttccgtgagtcaggtacagttctgcctattgcgagccacggcggtggccaggctggcccgtggagccgcgtccctggggggcgtctcggcgcccggactgccgcgccccgcttgagggaagcccccgctcagggccgcgctggggcctgaaacccccggcctcggcccaccagttcttccacactgtccttctgcagggctgaggtttttgtgactccatcacatagtcaccatttcttcctctgttttgtttaaaaggaaaactgaacaccattaccctcaattgttgtggaaagagtaacggattttgaggcacgttattattttagaaggtcaatatttttctctgttactctgctagcagatgaactgcaagatggtcctggataggaatatttaactgctgatatgtggtttttgagccaagatccatattgagtttaggatttaaaaaaaatgactagactaggaggccgaggagggtggattgcttgagctcaggagttcgagtccagcctggtcagcaaggcaagatccgtctctccaaaacatatgaaaaattagctgggtgtggtggcacgcacctgtaatccaagctactccggaggctgatgtgggaggatcacctgagcccaggcaggtcgaggctgcagtgaatggtgattgcactactgcactccagcctgggcaagagtgaaaccctgtctcaaaaaaaagaaagaataaaactaaaacagaattgatggcagggcactgtggctcatgcctgtaatcccagaggccaaagagggcaggaggtcaggagttcgagatcagcctggccaacatggcgaaacccgtgtatactaaaaatacaaaaattagcctggtgtggtggcgcactcctgtaatcccagccactccggaggctgaagcaggagaatcacttgaacccggggagagggaggttgcagtgagccaagattacaccactgccctccagcctaggcgacagagtgagactctgtctcaataaaaaaaattaatttaattaaataaaacagaactgatggataactactggtaaatgtagaaaccagtggtaaagagacatggttttgtgtctacaaccccctggaaaggaacaaatgaaagccacttttttttttttaccataagttgaaataacatgatcattatttccagagaaaatcactctcagttgtatagtggagaatctcaggactggggaaggagtctatacggtagcttgaaggcaacactaattcagagaaatagtaataactattccagaacagggaaaaccagcatttttcctccatcctgatttgtagaggcacaccggatgaattggactgagctgctttggccaggtatggtggccatttaaagaccaatgcattttgtcagagttaaccacatgaaagataatttatgaaacaaaacaggcaatgctgtttcctctggcaagcctggtgtcctgtatccattggagaacccacggaagtacaacagcatgcatggcttttaagacacggaagacatttaaaagccagtttacgtacagaagcatggttttagattaactgcctgttggtacagctagaaacattgcagccctatcgcttatttatcttgcatgttgctctgctttgctatgaaaaatatcgttttatgataaaacttgttgaattttgatatgtattcggttatactcttagggaaaataatagaaattagagtgagagaaagtgctatgtatattaggctttcagattttatagatataggcttaagggagggtggaggttcttttttaagttgaatgactacttaaatttgttgatgtgaatttaagttttaaagattattattaattaactcttctctttgtctttgcatttaccttcccagatgttccagcctatcattttacttattctcattcttgtattattttcatcactttcttacacaacaatatttaaacttgtcttcctttttacactgttttttgtactgtaaatctttcatcatttaccattcattgtagtattttcagtttgtttattttgttcacccttcaagacaagaagtaaaagaagtataatttctgtagtaaccaatgctataaaaacactgaagactgcttatttctttaaaaagatacaactcatcttaccaagaccaaattcaataagaagcccaaacactaaaatatttcaggtaagaaagtgtgacatttttctgtatgaattgttttaatttttacttctttttttcatcctgtttgtctcctcttgataaataattggcatactgaatataaaaatggactacatgtctcataattatttctcagtagttcactattattattcaaaagctggacggacattcacaatttggtcacatttccaaaaagtatatacatttgtaaagtatctttgccaggttgcatcaaactaacaagataattttgacatccaataaatatctgaaaaaaaatatgggaaataaatgaaatgtgaccctcatgaaaactaagtaatatgtcgtaatgccaatgtgttttgtctacagagatatgcttggaagcatgagattggattaggtcttagttcatttaggaaataattatccctatcctactctatttgaccagattcccaccaaacctgccactcctgcttttacttattatacttgaagtcgtgtattgctaatcgaacttattgcttagagtcctatcctctataatagattgcctccagagtaggaaatactctataaatatgatatgtgaattgttttgaatagggaaaaaatacagtcattctctagaatttcattaaagtatggtcattttctagaatttcattagatcacaatccaagactggtagcatagttcaggcaggaggtgctctcgagatataaactaacttcaataaacctgagcatccccctttctcctcaaacctaaagtggcctggatagactccatctacccaaaggacccattctgtccatctcattgatagtttatccagtgccacccaagagtcagcaatctccgcacttgttgaagtcacatacttgtaaatattcacaggttggttgacggatatgaaaatctgtggaaagtgaagtatcttgcatgtctgcaaaaaggatatgtggaaaaactttgttataaaagttgctattggtaatggtccttggaatcccaggaatttaactttcaagggactataatttatttatagtctcatcctcccacacatccgtttgagtattaattaaacaaacaaacaaaccttcacaatagtctaaaactttagtttagaataactgctcttactctctataggatttgtttggttttggtttttggttctgtttgttttttgacggggaggagagacttggagtgaggagtggttacccaacagttggaatctgtcaatatgcacttctggcttttcattttagagattctgagagctaggtaaagcttcattacaaaaatgaatgaaatgagataaatgccatgtttaatcaattatatataattcaggtgtttgctttttaaaattttttcatctcagagataacaaacactttaaaacctaaagtttgtctgttagatccgtgataagtttccaggccaccatttcaggaactgaaagtaaatgtttgagggcagaaatgtagctgaaatatttatcatctttggagccagttatacctgttaaaaggttctcagccacctacagagcatttggaagtgtgtggagtgttgcaggttattacaatgactgggaagttcactggcatttaggaggaagggatcagaacttcaaggtccctgaaatcccacatcacaaataattggcttgtccaaattgctgatgttgtctttgtggagaaacgtgatatggtatgcacttattcacttcagaagcatcatgcatattcaccaccctgtgtgactttaagaaactggctttacattttagctttctttatcatgagaggaatcaaaaatgaaataactagatcagtagttatcaacactagctgcacatcagaatttctgggatgtttttatttggggacctactccatactaattgaaataaaatgtacggacctaggcatttgtatttttaaaaatgccccagaaccactactcttagatatttgaattatctaaaatacacattctatatagcctcaacaaagcttacagtaaactatgtgataccaagatataggatcattagttgtctaggtttgagtagactttaaagtttcagctgctcagtggatgtctgaattctctctacagcatttccacttagttgtacagcctttgccagaagggatatcacctccagtgataaagcaattatatttctgcgctggtggtcgtgccagaaaacttggcttgcattaatacaagttttcaaaaacacaaaatcaaaggtaaataggagtaatacctaacagaaaagagaaccaagatgaatagtgtgtgggcacagggtcacacacccactgaaagaaacaggcatgtgtgcacactgaattcaagactcaagatgatcccacagtgatctaacatgttattacaacaaaatccctaggcattcttagatgggctgacagcctaaatatatgcaaagatggtgcaaacacctcagtgataacttatgacctgaataggaaaggagagatgtctgagctaaccaaaacaccagcctcaactatagatctcattttaggaactatggtcatgttccctatgttgcccttctggcaacaggggtattaatcttacctatgaactcctaaagcagtgataaggtttgactctgtgtcccactcaaatctcatcttgaattgtaatcctcacaggttgagggagggacctgtaatccccacatgtagagggaggcaggtgattggatcatgggggtggtttcccccatgctgttctcatgatagcaagtgagtcctcacgagatctaatggttttataaatgtttggaagttcctccttcactcctctccactgctgccttgtgaaaaaggtgcctgcttccccttccaccatgattgtaagattcctgaggcctccctaaccatacagaactgtgagtcaaagctctttcctttattaattgcccagtctcagggaagctctttatagcagtgtgaaagtggactaatacaggcagttattttatagaatttcatgagacttaaacctcatccagatcctccatatgtgaaactcctgtgaaatactggggagaggaaagtaggctgaagcagtactgacttgactgctgctcacagattctgggggatatgggatcattccaacagctcctctgaagttagtgaatcaactttactgaacagttgaattccagggaggctcttttccactctgccccactcactgcataaaccagcttcccggttgtgcctgtgtgtacacacacagctccatcacactgtggtgtataatgagaaatgcatccagggtcagggcattcagaactgcctctatcttaggggacatgctggggaccagttggtggaaggtggggtcagaaaattgccagcaggcacaaagtgacctttttccttgccatcttttccctataacttcaagctgttcaatgggcgcccagtatccagggtgcacctatctcttaaagcgtagaacatagacttgggaagataagttgacaaagatggtgcccaaaacctcagaaagagagtccccagcatcttcccctttgatcctgttgcttgcattatttttgttatattaagctgtttctgaaagaggaacaaccaggcttcttgattcaccaagagagcaaagactcttaattattaagacaaggcgtcatcttttgtttggacctttgaagctgtgctatttaaacatcacaccaaagtaaactcaacagagcaagccttattctagaaaattcccttgtatgcacattcttggccataggaagaagtgtcttcttgttaatttggcctagatctaagaaaaaaggaattcagttggctatttttaggcataagtaactaaactcataaaacaaaggaaaattcagtcctgagcctggaatgtgttttggcctgcattctccaatcttcactttagtttgtgtgatagaatgggatatggttatttaatcagctgccaacgaagtttggagtgtcaatttggtagctcagccctaattccaaatattcgtgcagagtttgtaactgcattctgatagaactacagtccagttcatctagtagagtcatgctttgggtcagacaccataactgaatgtagaaattgaagagaaggtagtggagaatattaccagaaagtaagaaaagtcgaccatttattaaactactgggatatggtacagttaaaacacagtatgcatgaagacataactgcttaaatcctagttgtaaaccaattaggtctaatgaaagatttcattctacgtttttaattttgatctggtttttgataagtaaagtaatttcattcatattttgatgaaactcacatttcatgggtaggtcctgatattctcagcagtctacttctagaatttcagatagaaactcatacaaaatagaatgtttcatggcctggacatggcagaacacctttgtagttacagtaataaatgtggtaatatcttaaatgtggtaatgcttctaaactgtactttcgagttgatcagttgagagaagggaaagtggtagtggctgtttttcatgtttgccattttgaaaatgtgtgcaaatcatagaatctctaaaggtcctttccatgtaacttaaatacattttcatccatgtcttccctgcttaaaggtgtattttctgcacttactggcagttctagtctgtgtctgtcctagtgaagttgtgggtaatattttaaatatttctgggggcatcttttgagtagagtactgttataacccacttgatcaaagaacaagagcagcaaatataacactttttagatgtaaagagaaacctcagaaatctctaccttgcactgctcactgttaagccaggctgtgttgtctttttttttttttttttgagacggagtctcgctctgtcgcccaggctggagtgcagtggtgcgaactcggctcactgcaagctccgcctcccaggttcacgccattctcctgccttaggctcctgagtagctgggactacaggcgcccgccaccacgcccacctaattttttgtatttttagtagagacagggtttcaccatgttagccagggtggtctcgatctcccgacttcatgatctgccgacctcggcctcccaaagtgcagggattacagttgtgagccaccgcgcccggcccaggctgttgtcttaaagagccccatctgatcttatatcccagatatttatgattaataaacttaagtctattgacatttcctgattattcaatttcagtgttaccattataaaacttttttagttcagagttgtatgtatttttctgtagctatttttcaaaataagataccaacaaaactcaacatctgaagataaaattgcaaacatttagtttaagatgagaatacataatcagtggttgttagcagttattcagcctttacaaaaatgttaataaaattttattgacttgcatatttgaatgtttttctcaatgtttttgaatccaaattcctatttagcatatattaaactcagataataaaaatttgcgtttgttttgatgatttttatttaaattatcagcaaagttttagatatattttaaaaatgattttaaatgattattttttactaaataaacattaaataaacagtaacagtgtagagcattacactaatttaaaaactagaacttttcagaaaagtttagaacatcaactcacttaagaaaatggcaaaccaccctgaggtattcaggagtggtgcagtatcttgactatttgaagtgttacaatgtcatgcgtactccagatatggagctgtggaaattactgactctgaaaaagtgtgctttatgcgtttattttctgtagtctcttctgaatgttttgagttgagctgcttatgttaacaagcatatgcataagtgattattgaaggctgggaaacggcatcacttctttttgaggttgtccaacatgatgtacctttaaagttagctctttaagtttatgtcaaaagtacctgccttaacctgtgcattcaaatattaagagagtatgaggggcagagagcagctcatcagtttacttacttgcctcaagtgatttagtaagggaagataatttaagagcttttttaaagaaatgacttatatactcttatttcttaaagtcagaacactcagtttagtttgtagtttataactcccttccatctttcttataaacagttttttcacattctgtgttactccttttgcatcactgactccgggacagacaaaatagagttagacttcttaaatagaacatcctgtgtattggcctagatcagtcatttataactgggtttcagcatgacaagttactgaaattaatttttttctggacattaggtgactcctgggaatccaagcaggaaaggaaatgtgtatctgctgagcctttgcccgaaaggaaatgtgtacctgctgaggctgtcggcccactgcatagagggccttagcgtttgtaaataagcttagattacatctagtggaaaaagccgtagtgaagctagttgaggtagtcaaggaaaatgaggactccctggccttggacctcatcttgatatgaaaaaaactgtccaagaggggaaactgaagtctctattcagcctccgtacttcagagggaatgtaattgattcagatgcagctatttgtttgaagatacctgatatttgtagaaagtgactggattcaaaatagtagtgtggattaaaaagagttggataaagaaagagtgaggttggctgggcacggtggctcacgtctgtaatcccagcactttgagacgccgagttgagtggatcacctgaggtcaggagttcgagaccagcctggccaacatggcaaaaccccgtctctactaaaaatacagaaatcagctgggcctggtggcgggtgcctgtaatcccagctatttgggaggctgaagcaagagaattgcttgaacccgggaggcagaggttgcagtgagctgagatcgtgacatcgcactccagcctgggtgacaagagtgaaactctgtctcaaaaaaaaaaaaaaagaataaggttgcagaaatcttattttgcaatatatattgatagcgtcaacaacatcagaatacagtggaagggtcagacacagctgcttttgaggatgtactaaatacctactgtttccttcctgcacttgaaatagcttttgccctacatgataccaccattttgtaactctctcttcctaaccccttttcctttatgaatttttgagatgttcatgggcaaattacccatcaaggtattgtgcttataggctaatatggacttactgagggaccttggccatggaaaatgggtctgcatggttctgcagaagaccctgaaaatgggtctggctgattctgcagagtgggcctaggagctacactgaagtgtgactttaggcctcccgttctgtaactttacctccagatcctttactgtatccctctcatatcatgatgccatattccttttgacctgaactccaggggctcaaaatctaacacccacctatgcagttccccattcagatcttccacctgtttccccactccatgccctgtgaatgaaacagatggctttcctgacctctaatcaaagcctacccatattgatctgttccttctagtccttagtatgtgctacctcttcttttctgtgccgaagtggtgagtagccaatagttatttcctctaccagtggtattttactaggcaattattggaaatagaatgctgccacccggtagtgataaatctaacatttctcgtagaagatataggtggattagttactccctggggcaatatggattagttcctgtgtccttcaaattgcactcaccaagcctgagccatgctttactgctgaaacatcctagcagagagaagtaagtggctcagggtggccctcttgtggtggacaagcattcccaggactctgctggtcactaaagaaaaggtagccctcaaacagtcctttttattatttttgattttattgtcatcattatcagtatcctccaagtcaagaatctgtaaataatacaatgagatgctaaaaacaagtttgaaaaatgtgagcaaggtctgtttctagttttaaaatagcccacatttctcaaatatgttactgtttggttcagaatttggaccactacctaaaaagaacagatcattcaaacgtgtcttttgaatatttctgtcatctggaaatgcctgcgcataagccccatgacggatgtgcttggctaaaaaacctgttgacgtgtcctcagccttcagaatagaagagacagccagtttcccatgattctaaggataaacatcccccactggaaaaatattacattagctggcaagtaataatccaaacatgtacatggatagtaaatattctgtgtgtgatcctcataattttatactccaaaacagtattttaggaggatcaaaattatatttattaacacacagttgaaattgccattctagaactcaaataacacaggaccaaatttgacagaatcagctgtggaactttatcaaaagtctgaagccaggacctcaccactggatggtctgagtcagaagtctggggagagttccagcattactatttttctttttcattctctgtgtgattatagtatgcagctaggactgagtgagagtaacactaaaccgtgatctccttggtggaatgctgtgggtactcctaggagagactctccaaatttgtgaatttataccagtgtagtgggctactcagaatgcaaacagtcacgctacatgtcacatttcagggaatcttcagagctgaccagacctgttgaagacaaggatttcttcctcttctttgagtcctcttggtctaacctggcacagaattggtattcacaaatatttgttaaatggaatgttaattgaagtacccaagaccttaggaattgaagataatttaagatttaagagttctgctaaacaactgagatctcatgatcttaaagtactttgaaaattgcaaggggcagacattattcaagaaggaaggatttcttaaaatacgtcctttatagtagcctttgaactttaacatgcagaagaatgagtttaggcggggcacagtgtttcaggcctataatctcagcactttgggaggcaaaggagggaggatcatttgagctcagaagttcaaaaccagcctgagcaacatagcaagaccttatctcaaaaaaaaaaaataaataaaattaaaaaattacctgggcatggtggcaagtgcctgtggtcccctactcaggagtctgaggctggaagactgcttgagccccagaggttgaggttgtagtgagccatgatcacaccactgcactccagcctgggtaacagaacaagaccatctcaaaaacaaaactaaactaaaacaaacaaaaaagaacaagtttagtttttttaaaagttgttctctttttcaatcttttctatcttctttccaatgaaaatagaaacacagtaccccttttattgttaaatatgtttaaagggtaaaagaataagcaatggaaaaacgttataaacaagaaatcagaagctctccagtctcataacaaccaggttgtcataccataaagagaacaaatgagtaactgctttgtaacacttcaggatcattctgcaaacaaaaccatagattaaatatgtactggcactagcatgcttaaggccatgttgccatgtttatcttcagattttttaactgctaagataaaatccatttgcctttttattttgacccagtgtttacaattagctaaggacacgagcctctttagatagtaataaatactcagctggctgggcacagtggctcatgtctgtaatcccagcactttgggacgccgaggcgggtggatcacgagatcaggagttcaagaccagactggccaatatggtgacaccctgtctctactaaaaatacaaaaattagccgggcatggtggcatgcccctgtagttccagctactcaggaggctgaggcagaaggatcacttgaacctgggaggcggaggttgcagtgagctgagattgcgccactgcactccagcctgggtgacagagcaagactcccatctcaaaaataaataaataaatactcagctatatgattcttatgtcatacttgaaagatagagtatcttctctctcatttggacatagaagaaaactgaatttaaaatttgccaaagccagaaatcaacttctcagtctcctctcatatccagcattcttatttcgattttcttcccttgcacttcttggaattttgaacttcaaggcactccaccaggaatgaggagacctggattctattcttggaatggccactaagtggctttgtgaccttgagcagatgagttactctcagggcctcttccctcaactgtaaaatgagaaggttagctagatgatttcagaagttctttctggctctaaaattctgtaagtctggaaacacctgctagtgacatttatgcacgcattagttctcttttaccctttttaaaatgtttttgattgtgccttaatattattattaatatagatcttttccatttctttttagaattttcttttttgtttcttgacagcaggcagtgtttctacatttattttccattaagtgttattatgtacatttctttacatatctgttatacattgaaataagattagtatgtcataaggtatgaatgatgtaattctttctaaaacatagggcaatcatttgtgaatttcatatttgaagatttaaatgttcaaatggtttaaagaaaaactgcattacaaaacaaattgcatttttttcataagattttcagtcattctgacacctgcttgaaaacctcaggcagttcaagatgtctgaatgtaactgtagggctgagtataccagcatcagtcttttaaatgcattcattttatgtatataattgtggtaaattttcttttaaaagttttcttaaaaaacaaaaagttttcaagggaaaatatcaaaagctgtgctgaacatttcttgactttgcaccgtatcacctaattgacttactttctgtcttttgggtatgaaatatggcctggaaattatatattttatataaataacatataatataaattatatatatataaacttcaacagaaaaagttggtaaatactagaataagtggtaaacttggagtaaactttttgtcaaagattttcattattatttgattctgtgtacaatttaagatcagctttaccatgacaagaagcagatgaagcacttgaatctgatatacattgaaataaattagtatgtcatcaggtatgaatgacataattctttctaaaacatagggcaattatttgtgattgccctgggacaatcacactgggacagccattaaaagagattgaaatgggtactactgagtgacacttaggaagtatagtccaacctaacatctcttgtaacttagacacatactatctgaattttcgataggatttacaaaatagtcttagtttgatttacaagtgatacatagaagttaagaagtttggagtagaagaaaaggtaaaggaaacaatgttttttgttttgtttctctgagacagagtcttgctctgtcaaccaggctggagtgcaggaatgccatctctgcttactacaacctctgcctcccgggttcaagcaattctcctgcctcagcctccctagtagctgggattacaggcctgagccaccacagccggctaatttttttatttttagtagacacagggtttcaccatgttggccaggcttgtctcgaactcctgaccccatgtgatccacctgcctccgcctccagaagtgctgggattacaggtgtgagcaaccacacccggccagaaacaatgttaagacaattctgtattgatgtttttgtgcaactccctcctccctttccctctctcaaagaatcttcttcctagcctcataagcatggaggcagacatgagctaccctttattgtgtgcttggcgctatatatattccctcatattcttatggcctcttaaagtaaatataattatgtctttaaggaagaatcagggtctgcaagatcacacagataagtggtggcagcagaattgaaacttagatctctatgacaaaattccatggtttgcaatcagacaaaacagttcaaacccgtttcctccacatgggtgcatttctatgaacttttgcatgatgctttaccacaatgagccttgcttgggttttatcagtaagatcagattatcagtatctagagacagaattgctctgagggtgaactcagataaaggtctgttcaaagtacttagcacagaaccttgcagagggttgcccctcagtgaataatcactattattactataactatcactgttattgttgttattgctgttgagattatgatgtcaggctttccagacacagagtatggtttcatttgattgtcctacatgtattaaagtcctactgtgagcaggttactattactaaactttagctcctcatgaaatgtttatctggaagcaggtgaaaataatgtgagtgaatatgtattactttaaagaccacaccagggaagctcttcagacttgaagataagaccttattgtttaaacttgtgtatttgctaagttaggcaaaaaattgctctagagacttttttgactaaattaaaccaaatatcatcagatgcatgtgtgtacaaagccacaataaacctgaaaatgtcgctggggaggcaagatctcctagcatttcagaacaggctgatttgatcatgatttagagagcttttccatacacttaggctgctttctcttcctatggctgcagcacactttagtggaaaataagcccataggtatctcatttttggggtgtgtgtgtgtgtgtgttttgtcctcccacaataagaaatctcatcctttcccatgggctctgattttctctaacgtaaagacatcgctactactgtagataaaagcaacacactgtcagaatcacagagagctaagaggttggactttatgttccatttctattttatttgaagatagaagtttgataactttcacagatcttttgagagtgcataatatatataattatgctacacatattgttctgccacatccagatgcaaacttctaaaggtgcagcagagtacatcctgccaccagctgagaaggagaaagaattatggaaggagggagataattcttgcctataaaaaaatgagtttactttcctaataaaataaatctaaaattggccattgtcattgtatgatgttaacaaccagctcttttggcaagtttgaaaatactgggctccattataaaagctaaaaatgtcctggacctggagttgtttacccagagcatgagctgctctaaagttacagagctctggttggaagaggtggcttgaaggccgcctccaagtaactgacgtcacagtagtctcagctgctgctgtgacactaagctgagcagctttttgacttgtaaaagtggtgaaggtttcaaagggacttgtcagtactgctctgtggaatggttggacttattttgcatccccttttcttgtaaagaatcgagattcaccgagctgagacttttctctttaagacagctagccatccactttcttccactgctaattgaccagtggtcgagcatccataggatttctccccagtgtgaaaggtatgtttctttccggcaagtttacaagcaagtgactaattatggcaggatacaaaggggctgctgttgagatgttttaaactatggatactgtttaagtggagtgtaatttcaacatctgtctctgctgttgtctgtgtctgggcttaaaaacagtgggcggggtgcataacagattgtactgactcctaggaaaaaggctgttcagctgctcagggtggatttcccaactgtggactgacagtaccatccgctctttgagactgtttttccaacactgcttctcagttgtttgaaaagcactttgcccatcattgattttcactaagtatatttattcaaatgtgattttttttattcatataaagacttttaacatttgcaaattaaaggtcacaatcctggagacttggtatttgaaaattgcggtgaaaaataaattttagttttatctaaggtggtggtggactcactgtagagttagtgtttctgtaatttgagctgaagtctatgccattcataattgaataatctacgtttaggagggaaacttaccactatgtcttttgttcacgatggttagttttagacatttgtttactcaaaccaaatgtttgcttttaaagtttgcattttataagtaaaatcagtgtgcatacagcttggatgttttctaatttgagtaaataactgtaaagaaaacaaggaagaagataattaaatgaaacggtaaagttgattcattcggaattgcatgtggtagtgtctctttgaccttgttggagcatgaggaatgtgctaaatcagcaatacacagcaatgaaaaaaatttcccttttactctaacaaaatcaaatcatggtggtctttggaaagattcaattgcaagtgaacaatagagaggaatgagatttattaattcattgaaataattcaagtgattataatagcctggagaaagggatagagaatttaggaggtaaatggtacattactctgataggttataagctggggaattcctaatccatcaaagttaagcagaagcaaaacatcttcaggccaaatgagtcttctaggaattgtgagattagcagtacctactgtgtgtggcatttctattggaatatgtaacctcttataaatgaaaaatctttaattatgtgaaaagtgatatgtttagcaaaaggaaataaggacagcaagaaacaagtactctaaacaataatctaaaaagagagaagtagcaatggagcagctgcccctaaggaacgctgtttagtttgtttggatgcagtccagttttcaatgggcgagttggaggttgaaagggtagtgacccaggtgtcctaagaatggagcacccctcagagaaagaattgctgccatgaccaaactgaggctaatttgggggtgaaaataatttcttgtgagacttgtgtgttactcttaaactttgcttactggtagggccggaaggctagcagaactatttgcctcccatcaccatacttatgcaacccactcacaactctttataattctggctttcagccctggaaaggggaagtaagttaaaagggattatgcaatgctggtttagagttggggtgtgtgactaagtaatgcagctcactctgtcctcttacatttgctctaataaatttttattctgaaatggaattctagaaggaagaacataaactggagagccaaagagatatggggtaggggatgcagatagcagaaatccttccttctctcccacatagatgccagtatctgtgggagaaaatgagtgacaactaggaacaaaaagaacttttatttttgccccagtagagagcacttaaattgagtttttgaatctgctgaaccactttaccccataacttctcattacgaaacattctatctctacaaagttgccccttcagtttgatattttttgtaatatttaagtcagatttataacaaaagcagttttacataagatttgttcacatttttattaacaataaaacttttttctttaaatatgtgacatgtatctttaaaatatttgaaaaaaggcaaaagaagatcatggagaatatgagagttcacacaattacacttgcttctatctcgttttaaaataaagaccaaaataatctgttttttttccagagaacaacatggagagggatagatggagaaagagaggagaaagggaaggagggaggaaagacaagaagaggaagggagggaacaaaggacagaaggaagaaaacaagaaccaagtatttttcaggcatttgctatgatccagagcagtgtttaggcacttcttttaagcatttttcccttttgctcacttaatctccaaaacaattctatgccccccccccaccactttatatttagaggtggaagcaatatgtttggctgcgttacatctaacattatatttacgacaagactgagatgctaagaaggccaaatccttccacaaaaaattggcacagatattgctctatagaaatgttcttgcaaaggcttgtttctgatccataactattacatttcttggcactagcaattgctctgggcctggaaaggaaaagctccatacattggtccttctccatattaagggatgagtttggctctttgcaaataggtgcaggattcggtctgcttcaggactgttacctgggtttagatatagtcttgttatcaagagcaagactgatctagggtattcctgaatgatcttccggtaggttaaaaagagaaaggcctggcatctttcaacagtagcatggaagcgattcaagaagagttaggaatagaaggaaaaattggagccatttgctacataattgtagaaaagactttatggtgatttctgaacatttccaatgtttaaagacagttgggataaaacatggatttatcatagctcctcttttccaggtagcttgaaattagtctgcatccttttttagtttctttggttaaatctgcatttatctcttattatctcaaaccacaccattcttcctaagaagttccagtggcaaatactttctagtcagcaaggtagtttcaccacacagttaattacgtatagttttaaagcagtctgctagtttcaagacaggcactgtctgcatttcctatgaagaattgttagacgaacctaaaagattactaggtattcaagatcaagatcaatggaaattagattagccaaaacaaacaaaaaccaaaactctgtatgttctttaccatctttattttatttgttcttcactgacatttattatggcaagtacttgtggttactggtttatatgtgggaaagatagcaaagaaaggggtgacagaggaggtggagaaatgaggtcagaaattgagcatggccaaatggataaaatgagatatgatagcacctttaatagccagatatgaaattatgtatttttcgtgactgaattaatcataatagtgctagtgccaaagacataggaaaaaattatcaaaatatctttagtaaatagtttgagagtaaagtaacaatatagatcccaaaattattagggtgttttgaaggtagaaccctgcatatatagctaacatttttcatttcttattctattctaattcattgatcgtgactcaaaaaatacagattcaaaactgtttactagtcagatatgtatgttcacaacagtctgacaaaaataaaattagtgttcgatatttagctgatatttaggatttgaaatatgcagttatcttctgtgaatacaaaattggcacttgctgcttgggtatgtggccttaattcggcagtgccagcacccacaaagctattgactgttgggatctttgtccgtaattagcattagctgccaccagtaagttatagcattttgataatggcttagtgactgaagagttagacatcttataggcataattatcttaaacagagattcaaacattttaaacatgcttttctaccccctaaaaaggcacatgacttatttaatacaaaattatttttaattgaagtcacaatgaaattttgtaaagcaaaaaatagaaaactttcttaaatttctcaaactactttgcattcagtatgccatttaatctttttaacagttctatgactatccccattttaatgcaaaaaactaaatcccagaaattttagacttataccagttacatagctggtattttaaattctgacttcaaaccttaagtacacgtccctgaaggctagaaagttaattatttcagtcactacttaatgtaatagaggattccctgaaaactgagcaaaatgttttcttcagttccctgtattcaatatcctaagcagtttatggtatatagcctattcaaaggaaaagagagcatggataaattttaacgtatatttcacaggatagttttgatgcttctagattttccttgatgaagtgacataatgaatatattttttataatttagattagtttctggatgatacatcagtcctaagttgactaccaactttggggtcttcataagtaacacagtaatgacatttggcacaggcttgatctctgaatatagaattaagactgcaaaccagctctgtttcaggaatttaagtcataagaatatataatcaggttgcatcagaacagaaagaataattttattgcagcagaatctgtcacagtgtgtagatgtgagcatacatttgaattgtatacttacactcttattcatgaaaaaatctatttttagagtaagtggttaaagggatgattacatctcacatgcgcatttaatcatcttgtccactataattttgctgtctggtctcagaaagggaaaaaaactttggacaatacttattactttattgactgtgttagtttcttcttcttaagtagactgttgtcatctcttttcttttgagtccaattttcctatagtttgtttatgtcaatggctcgacaaaatgataaaatatatttccagaaagcacatggatttggaactctctcttgttatgtttatattaggctttattttaaaggcaagtgagactgcttcaaataaaacaacttcaagcttccaagaaacagttaagaggaggcagagaagagcagaaacacttctttgctgacacttacactgttgccatggacctacataagcagtgggagaacacagagactaactggcataaggaaaagatggaattactggaccagtttgacaatgaaagaaaggaatgggaaagtcaatggaagattatgcagaagaaaatagaagaggtacactttaatttgttttggatatactgtaatgtttaagtgcaggatgaaaattctgtgggctgttttgtattggaaactgtttttgatttccttattcgacctaagaggtacatttctcagtgacatttactagaacaaaaatagcataatcttatccaatggtattgtaaggattattttatatcattgcatgaaaattaagcatttgaaatgtcactctataatgtttcaacttattattttctggctagagagcttttttatcaaaagtgaggtatgtattttgcatgaattttcaaataccaggtccaggagtaaaatgcaagaaagatatacttggtgggacatagattagcaaaattatagttgggcattagaacatagatctttcctaagaagatttatgagtaatgtctattaaaggaaattacatgttagataatgcagtataatcaaaaggagtatcatatatcaaacagaaaatggcagtagacatgagatttattctatcaaggtgtgcacatttagtggcatatttattggaaaaggagttatgaaaaatgacatatcacgactctgacacagtcattttgttcccgttaaccctccctcagtccgttgaccctgaaatatttccttcaagcatttgcattgatgtatattcaagcttttgcaccaattggaaataatttatgcttatcttgctttcttttggtaacatccttagtattgactttatatggttttatgcacattaccaaagttgttattttaagacttcttggccttttttgcaggcaaagtaagtgctttatgtgtttatagtacagtcatgtttcttattaacagccatgtaattgactgtgaataaaatatgaattggcatagtaggaagaaagctgaagaaaagtaactattaagcccttcctctaaaatagagctgagaaggcaggcatgtggtgtatgattagggattaaaggagaatatatacttcttgtccctctatagtttagaaaatgtgtcctgcttgctcctttaacccctctacccatactcggattggatcaacaaagagattccctggtcaaatcagaatccaaaactccagcgcaatcagaaactgacctgtagtcctaggtcattgccttccaaatgtttgggaagttcagttcataacagtctcagacaattctagcatccaagcaaaataactaagggatgcaggattagtctagccaattttttaaagccatgtagttaaaagaagctgctgtctgattaaatttattactgtccaataattattctgacaattctatagagttcatctatggtaaatattagctttatcaattagcaggcatgaaatatgctttaaacatcaaattatacctcatagagataacatccctttctgtatcagagagacaaacgggctgtcatatttttttatcttggagagtagctgtactgctgtttatgttttgctgcctgtgctatacagctccataactaaactaaaattaagaaatcaacacttggaaaaataatctcatgccacaagcataaaagattgtatttgtttaacatttatcacaaagttctgtatgttaaatcagatgtaaattattaagccatgtactagagaactgtagattcccaggtatgcacatatatcttcagtgactttaagtgataatatctaatgagaggatgcagtgttggctattaagatgctcgtagttccctgttcagccactatccacagtcattgcatttgctatggcaaaaccaagatgttcatacttggatcatttgaaatttgaaataatccagatagaaattctggatagaacttatagacgtctggggttttgttttgtttttttccacactgtagtctcctgcctgtatcctttggtagaataatcagataaccattgacaagggctgagtaccaagtaacatagtacctttgtacaaaatagttttccatcaataacattgttatttgttgattcatacctcacctaaatcaagaaaatttaagatggcataaaattaggtatgatataaaatatgcaaaaacaaaaatggaaagatgagctgaagacaggaggaaggatcatatatgaaatgtaccagtgagtctttctagtaactaacaaaaattatcaggtgcatataccttcaaattcaaatgataaggcaaacttatttcccaggaatagcacatttttcccggttttgcaactaaagcaattttgttttcactcatgacttcgcaaaaacaggacagtgtcaccaagagcatccttagatttaacatgtcactttttagggttccttcttatatccctcaaggtcagctcaaaccataatgcccgcagaagttcagtacaaataatttggcagggaccaaacaatcaattcatggctgcagtttgatgctatcctgacttcatacaataaatactaatacatttgtaagcattagaaaaataaatacactgtatatttttcaggcatcaactctagtgcttctctcaactgagttatcggtatgtattaagcagcaataaatctattatattacttgaataatacatgtagtgtagatattgattgcggctgttaaacatagagtcatttgctttgatagtcatctgacagtctcttttgaagtttgacaagcttttacatgacccaagcctaaagagaaagccatttctttcctctattcagaagtgaactgaatgagtgtgtgcaggttcaactaagatctcataaagaagtaatctggattctaccttaatacagactaatagatgatcaaagccttgcagttctattatatcacgtagggtattgtcatatttgttttaatctggatgagaaatattttaaaaatgtgtatcactttgagattttttaaaaatctcagtaatatctagccctcacaatgtaattgaccaaccaaaggaaacatcttttgactgacaagtgactgtttagggaacaagaataagttgacttactatctgagattgtcaagcatttagacagttaaatgttagtgtacaagtaggaccagacatttgaaaactatgactttaatgttaaattcttgcatctctctgaaagcaattatataatatggccagtaattgattcaggtcattctaattttgtgacagtgtttctgtatttatatacagatacagatttattttatttttgaatgattgattgctagtcaaaagaattagcatccatgtgttgccctactaaaagtagcctttatgtttcatcaaacttgttccagctaatccatattttagaggcactatttggaggccgaagcattaatacccaggaagtatattttaatatggcaaagagaactcaaagcggtttgcttagtatcaagaatattagcaaagtgaattaggggaaaagaagttttaattttgttttgtttttcttacagctttgccgggaagtaaagctttggaggaaaatcaatatcaatgaaagtgctaagatcattgatctttaccatgagaagaccattccagagaaagtgatagaatcttccccaaattaccccgatttaggacaaagtgaatttataaggacgaatcacaaagatggtctgagaaaagaaaataaaagagagcagagcttagtcagtggaggaaatcaaatgtgtaaggaacaaaaagcaacaaaaaaatcaaaagtagggtttttggatcctttggctacagacaaccaaaaggaatgtgaggcctggcctgacctgaggacttctgaggaagacagcaagagctgttctggcgccctcagtacagtaagtaagatgtgattggcctagaactgtttctaaagaaatatttacatttcaaagtgctaacgggctgttgcttatatgtgtaaaggctcttgaagaacttgcgaaggtgagtgaagaattatgcagctttcaagaggaaattcgaaagcggtctaaccatagaaggtaggctggtacatctgattattttagatgggtaaataaaaaataatattgtttttagttaatgactccaaactgcctcctccttacatgtaagaactaatgagttattaaaatgtactatctagggtgggagatagaaactttaattttttgtttgctcgtttgtttttgagatgttatcttgctctgtctccaaggctggaaagcagtggcatgatcttggctcactgcagcctctgcctcccaggttcaagcgattctcctacctcagtctcccaagtagctgggactacaggcacacaccaccacgcccagctagtttttttgtatttttagtagagacgggatttcaccatgttggccagcatggtctcgaactcctgacctcaaataatccccctgcctcagcctcccaaagtgctgggattacaggcgtgagccaccacgccaggccagaaactgtaattgtatatttctctgttcactaattcttaaagcaaatcttccaattctctttgtaatctattagtaatactttactctttttcgtgtctaattaaggtagaccctccataaaaaatcagtaagtaacctctaaagtagttctttctcattctgagcatttggacaatgaaagtgtacaactgggctaattcagttaaacgtatcattaaacgatgtcagaattaacagtgtggcgttttgcttatataatcatgttctactaaaatatttaatgcttaagagcactttattttgcttcaattcgtgtttatgtaatggaggcctacatacttttcagaacaacatattgtaaatatgtacacatgtacgcgtgccacaaaaaatgctgtttccatttggaaacagtatatacttaataacagtaagttttagccaaattaacaaatatattggaattctctacaagtttagtaaagatggattattctaggatcaacatttatctctcctcgtgggtcagtaggcttcctacattcccttatttttcattagttgttaggaagctcagaaagaatttttgtgctgacttgcaatagattttcttagccaatcatgttttaaacataactttgtcctctatttgcctatttagcttttctattctctgttaataggtatttatccacattttattgtaagctatcccataatcttttataatttgaagaggtataaatatgatttatatttatcagtgtgattaagtttgaattgcgatatttagttttttatttaatataactcagaaaagacttacttgccaattttcttttacaaatcacacctaatataatgttcttattgtcaccccatggactttagaacaaggttcaagatatttgtaattcaaagacattacaatttgacataacctaatgtttctctctcatttttcattatcctccccactctgctttataattaatccatatcaaagtactcattttccttcgagtagccatagtatttaatccttttgccttttacttcaatcctatatgccttttactcaagtcatccaaaaaatttttactttttttcaagaccaaatgacactttccatttggaattactcatatctcattgcacttttattcagatttgtatctgactacttaaaatgttatttcaaattcaaggagaagaacttgagctcacattacataatgaataagaattcagcaggcagagagaaggtaagggaatggcaagataaaagctacagagagagaaatgccagtagcagaaacccaggagactacatagtttaatctgagggtaggtgaagtctcaggtaatagtgaaaatgagagacaagtttggaaagagtttgagtcagagtgtgtagagcattgaatataacactgagaggtagacttcattccaccataaaaggacttgaagtttttgactgggagatttatgtaaaaatgatgtatgaggcagttgtgaatccttttcttatagcagaaactcattgctttagctatgtttgcttttgagagcttattctaaataaagttataaccaatacaccatgttttatcattgtttaggatgaagtcagattcttttctccaggaaatgccaaatgtaactaatatacctcatggggaccccatgatcaacaatgaccagtgcattcttccaatcagtttagaaaaagaaaaacagaaaaacaggaagaatctgagctgtaccaatgtgctccagagcaattctacgaaaaaatgtggaattgatacaatcgatttaaaaagaaatgaaactccaccagttcctcctccaagaagcacctctcgaaattttcccagctcggattctgaacaagcctatgaaagatggaaggaaaggttagaccacaacagctgggtgccccatgagggtcgaagtaaaaggaattacaaccctcacttccctttgagacaacaagagatgtctatgttgtatccaaatgaagggaaaacttcgaaagatggtatcatcttttcctctttggtaccagaagtcaaaatagatagcaagcctccaagtaatgaagatgttggacttagcatgtggtcatgtgacattgggataggtgcaaaaaggagcccctctacttcgtggtttcagaaaacctgctctacccccagtaatccaaaatatgaaatggtgatcccagatcaccctgctaaatctcatcctgatcttcatgtaagtaatgactgtagctcctcagtagcagagagcagtagcccacttagaaatttcagttgtggctttgaaaggactacaaggaatgagaagctggcagcaaagactgatgaatttaacagaactgtatttagaacagatagaaattgtcaggcaatacagcaaaatcacagctgctcaaaatcatcggaggatctcaagccctgtgatacctcatctactcacacaggtagcatatcacaaagtaacgatgtgtccggtatttggaaaaccaatgcccacatgcctgtgcccatggaaaatgtgcctgataatcccaccaagaaatccacaacaggcctagtaagacaaatgcagggacacctaagtcctcgcagttatcgaaatatgctccacgagcatgactggagaccgagtaatttgtctggccgtccgaggtcagctgatcccaggtcaaattatggtgttgtggaaaagctgctgaaaacctatgagacagcaacagagtctgcattgcaaaattctaagtgcttccaggataattggaccaaatgtaattctgatgtcagtggtggtgccacattaagtcagcatttagaaatgctccaaatggaacaacagtttcagcaaaagacagctgtgtgggggggacaggaagtgaagcaaggaatagatccgaaaaagataacagaggtgagaaagcaaatataacataatttggtagcatccatattagcaatggctctgaatcatgtttatatgtccaattcatataaatagaatgagggcacaagttttggactcttcttagcctcttgaccctgtttgtaaataaatataactcaacatgaaccttgaaggtgtagtttttaacactgagaatagtacattgtaacttttgaaaaattctgaaatgggataacataaatacagtaagtggatttaggaacctgaagaagatcaaatgtttgctctttcttgaaaaaatactcagaatggacattactcaatttatagaatttcattattttaaaggttcttttttaagtgtatggaaaatatttttaaaatcgttttcatttttcagttattaactatgattggttcagtcattctcagcatttgactcatgttctttctcataggattaatcacattaatatgaatatgggaaatacacatcatttaaaacagtgcctaatagagtccttttatctgtggaactaaaagatagtatatataaataaggttattcttatttgtatgtattcttagcatagaaattgaccaaaaaaaccccactcaaatggacattttaagtaaactgttatctttttttgttcctgtctatttatgaaagagtttaatcttcattagttataagagaaaaagaggtcaaagaaattggtatttacaaagaagagttatacaacactctcttttactcatataatttttaagaagctaacaaaaattacaaggtgacatattgttgttattaaccaatacttcagaactcctagtttcatagaatgcagtgagtacgcagcatggttttaaactattatgcaagttgcttccttctggtgtaaaaaactactatgtggatttcaaaccctgcaaaaatatcagttttcatccatcttatgagaaatcttgcctgtttttataaggtgcagaaagtatcctgcttttgtatttctctgctttttaattgagcccatcaatgcccacaaggtcctatagctaaagatgggaaatagatatatctgtacaataaccaaacaaaattcttgttaactaacaagaaataatactgagtgatttccctttttgcattcattgggagtttggcagggaggttctctactatagatcctcaggagcagtttttgtttttgttttttgttcttcctcctgtgggaacaaatctagaaaataagtctccaaaaagaaaaagaaactgcagtttactgtcagaccatggctaaaatagtagaaataggaggccatcctcactgcctagctcagatgaaagagcacaggctttgtggggtctaagaagggtcaataagaaccaagtgtataaagtgtgtcatggaagctttgtacttttgttttaattttaaggaccaaggaatgctttttttccattaaaataaaaggaaagaaggaagaaaataaaagaaagagaagaaaagtgaaggaaaaggttttctctcatcagaacatgcccaagagatagcaattttgtattagtaattagaatgaagatgtatttaaaagtattttaatgataattttaaggttttgatagatagtgccagtgatagtgaaaaaaaaaagcatcagattaatcatttggtttgtgtgccttttgcgtatcacctctaaaagtgtcaatgaatttgacataaatgaacagtttcttctataaattatctttttatttttaaataacactgtaacatactaacagcgcactaagaaacatctgtatttccatgatattcaagttatttaacttgaaattttaaatcctgagctcatcattagttctacagagagattaactgtattaaaatttgtcagtgtaaggaaaggtacaaaattatcaaatatcatattccatattaaaattgaattgctttaaaacattcaaaaccacaaatattagacaactaccttctttagttttcaatgctttttctttcttgtaaatttactaacggactaatcttatagttgagacccatcatatattaagcctattgttggtacccagagagtgagaggaatgtttttacttgtgtcctaggaatccatgtcagtgaacgcctcacatggaaaaggattttcccgacctgctagaccagcaaatcgtcgtctcccctccagatgggcatccagatctccatctgcaccccctgccttgcggagaactacccacaactataccatttctctgcgatccgaagcattgatggtttaagtctttggcctggattgctatattacagaagttctagtcccacttgtcaaacagagcattctgagtgtttacaggcggacctgttctcttccgacaagcaatttgaatcttaactttccatcagtcttcagtgtttttaatctaaggaataattatcttcctgcattttgatttcttagatcagaattttttaatgccatcctcattagttttccaatacaatataagttgaaacaatgtacaatattgtatattctttgttgcaagtggcagaaagtaaggttatgtgcatggccatgtgtttgtaggtgcatgtgttgaaataggaagtatcctagtatgtatttagatatgaaaaacttatgtgctagtgttgactttgaaattataacatgtatacctatatattctttgtgtttatttaaaagttttgaaaatatgcagtactgtttatattttgtataccttttaataggtatccacttaaggcatttgcagtacaaatattaattgaccacttccttggcccccagctacaatgaaaaagaagaattatgcacacatctaacattggtagatttctaaagacaactcataaataatttcttaacccatataaggataaaataataccattgatattcttgtttattctttttaaataaaaatgtcacaagtttaatagatcagccttgtaaagcaagcataaaatgttcataaatgttttatatattatttggtagtctagtatggctttaactgaatatttgatcctcagagacagtatcatgagactgcattataaatgacatgattaaatgatgaatttattttgtcagcctcagcaacaaacatttcctaaatgggatgcaaaaagaaactgaatgatgttgaattttagtttttctttaagttgtggtaagcttttagtttagctgctttaacatggagtcatacatacttagaggtaagtcatttattatttttttcctttttctaatcttttccttaaaattaatagataacaaactaagttacttttttactaacaaggaagatcaggaataatatttctttgaaagctgaaattatacttctcacagtttgctaccgaaaaaaggcttaaactaaaccttgacatccacagtagcatcaggaatagaaatgtgtattttggctacagtttgcatacagtgaacacataaaatctatattgaaaactgacagaaatatgaatgtcgaggggcttggaattctaaatggaagattttagaaggaactttgctctctactgtcactatataaaaccaattatgttatgttattagatattaactctatttaagcttttcttttactaagaaattcttatgccaaatgtattccaagagccatctccttatgatgtatttgaaccatttagagaaattcacttcattgtaccccatgacctgaggtaaagaaaataattttcaaattgcagacttccttgaaaggctcaagactgtagcatggtgatgtctagattcatactttactgtaaggacagtttcggtagttaagtggaattaaaggtctagagtgatttgtattggatggtaactaaggtctatacatctactcttttaattcttatttccttcaggaagatccttttccacaggaagctatcaaagaaaagtaaactagacaccaagtaatatcactctcataatatgctttccagctagaggggagaaaacaccaggaaagaggaaccctgggtcataaaatgacggacctgttaggaaaatgctgttgtgtgacaatggagagcctgcccaaggactgtgcaacctatctgttcctctccaccagtgtatcccaagtagtctggtatgatctgtggttccttagaatattgaggatctctttaaaaaatgaaatttctgatctcaccccatattactaaagcaaaatttccaggggtagggactgggactccagaaccattaataaaacaaaacaaaacaaagcaaaatattgatgatcaggcagatttgaaaacagtgacattgcttgatctctgaatggatggatgcccttgggtggtcacttttcttcctaggacttgcctttgttatctgtaaattagaatggctatactttcagacttcacaattttaagccacttttttctattaacagttgaatgaaccagtgggacacattttaacgtcttcttatgttgactaaaattatagttagagctgagaaaaaaaaaatagcatctagtccaactccttgattgtaaaactgaaaaactaaggttatttgaatgttctgttttctctttttaaatattttataacttttaaatggaaaaacctattaggtaaatggaaataatccttgaaaatagtttttgatgttttgtgatttttaactggtaaatttctactttaggtgggcattttcttccctagaatatgccctttattatgctatcattgctagatttaaagggacttgtaagcatttctggaaatatttgatttaaaaacatatattaatagatgttttccctagcagacttttggagcaaaaatattattttagttcagcagaggattactgatattatgggctgatctcagaaaggaataaggatgaggcagagaggagtacttgagtttgtgtgtgtgtgtgtgtgtgtgtgtttgtgtcagtgtcacataagttctccatattgccttatgtcccaaagccaaatataaaaatataaatgatgctttgtataattcattttatcaaaaattacccataactttcatttgtttttatatcgacaatgaagatgatcatatttcattttgcagatgtggccataaaatattatttacttctatataggtgattttaccaggtttagttatcctgagaaaacatctggacttaagagtttctgcttccctacaaagatctttaaagttatttttaggcacatttgtgacaaacaactacttgatattgaaatctccttcagccattagaagctatcaaataaagtaggtgtaaaaacaactgtctgtggcatttgtatacatcgagaacatttttctttccctcattttctgcagtgaactccagtaaagctaagtgtcttatgaaatctaaactcatatatgtacacagttcactctagcttcttccaaaatatctctaggtagtacaactgaagccaaacctgcctgacttcctgctcctggccacccaaaactccatatggcttctcgtacactgacatcctctctctacccatttaactgctaattgagtctgataaaagtcttctttgaaaaaagtttttacttctaagatttgcatttacatcataaaattaaaccattttcaggaaaatcagatttttttattacagtactatttgctttaaattcggcatgtttttcttaagtagcaagtacatgtatcggaacttagaactggtgggcgcggtggctcttgcctgtaatcccagcactttgggaggccaaggtggggggatcacgaggtcaggagatggagaccatcctggtttcatcacggtgaaaccccctctctgctaaaaatacaaaaaattagccaggcattgtggtggtcacctgtagtcccagctgctcgggaggctgaggcaggagaatggcatgaacccgggaggcagagcttgcagtgagcagagatcgcgccactgcactccagcctgggtgacagagtgagactctgtctcaaaaaaaaaaaaaaaaaagaacttataactatgacttgttcatctcaccctgaaaatatgttcctacaagaaaatgtgctttgcaaagcaaaaaaggcaaaaattggggatgagttcttcagacaagtaccaaaaatgatttctcgtcatttttattgtatgcatattcatcatagaaaataattttttgttttattgggaataaaatcatgatacttaaaatctgatacacatttcaatgatagtattaatccaataggttaaattaacaaattcttaggaaaaaaatctgtttatatgaagctatggagaaatctagaaagtaggtaacggtttagattttgagggacctatgaactcagaacaagttcatttagaggtgggaaacctgagattcaaagaggtctgcatggctgccaagattgcagggacagaatccaagcctgggctcactcatgatctgctctcctgtataaatgtcccatgtgcatctatgaccttattgtttgcaaagcaaattcatattccacgacttgtctgcttcttacaacaaactacaaggcaggcattgtgatttctaagtaagaaggaaaaattaagtagtcaagataatatttagaataaatatttttgaagatgatagttaaatagatggctcttcagactcctagctcaggctatttttccagccttcttttcccaaggaagagaagacaaaaaaaaaaaaagattgaacagctctttttcatttttgttttgttcattttatacatgacacaaattgtttatcttgctctcattgggagtttctgttgattccctctttcaatgatcatcaaaagtcatcacccctgacttaaatggttttatgaaattcaagaagttgtgaacaaggctttaacaaaatatttccacttttaatgcctatgctctgattttatataaattttgtatgtaggacatgatgttgaagtaaaaccaataaatagccaatcagtattcatctctagcgtcaactgaatcctgacctcaatcttcaaaagaatcagaatagtttcacacttcataagttacatatactccagaataaataaaagcagtttgcttgaagtattatcttggctcatttgtgctgctataacaaaacacacttgagactgggttatttataaagaacagaaatttatttctctacagttctggaggctgggaagtccaagatcaagctgcaagcagattcggtgtctggtgagggctgctgtgtgctttcaaggtggtgccttattgctgtgtctttatatggcagaaggggccaacaatggagaaacagcagaatagcaagaagcagctgaatgctatgtgatgcttcttttataagggccttaaatcccattcatgaaagagaagccttcataatccaatcacctcctaaaggccctacctcttaatattgaagattaagtttcaacatgaattttggaggtacgtattcaaaccatagcaagcatacagtaatttccaatataaacctcactcaaaattacagtcacatgctgcacaaaccagttcaatgcacatatatgatgataagattataatacaatatttttgctatactttttctatgtttacatatacagatatcattgtgttacaattgcctttagtattcagtacagtaacatgctgtacaggtttgtagcctaggagcaatagatcatactttcaagcctaccatctagatttatataattacactctgtgatgttcgctcagtgatgaaatcacctgagaacacgtttctcagatcatatccctgttgttaagcaatgtgactgcaattgtgctctgctgccagtttatttttgaagctttatttttcaattacttactcatggcaattttataagaatcattaaacaaatttaatccagctatttgggatctgcagattttttcttacataatgctgaccagtctcaacaccaaattgtctaacctgaattatatatttgtttatttgaatattttcttaaaattttctgtttaaaattaacccagtaaagggttttttgagttaatgatatctgtagtaaaatagttcatttgcaatgaaagccagagaagcacccacaatattctttagaggaagctacatgtaggagtaatagggggcaaaagtctccatctgtgaaaactcaggaggtaaatgattgggaataaagattcttcctagaaaagcagaggtaaggagagagatactgagacctggcatgccacctagttaaagatggtggccatgtagcccacagagccagagctaagtgaatttatgaggtattctacttagcaaaagcaagcatctaggctttccagacagatccaggggctgggaaaagcactacatcgaggactccagggtggacagtgctcacaggtcagataggcagtccatcctcaaggagatctcttcctaaaacagcagagacctgactctgggccagggtagaataaagtgtccaggggggaaaaaaaag

SEQ ID NO: 18 - DNA, 44521 bp, Homo sapiens
accaccacattccatgttaaagggttctctgcttgtcagaacaggacaaccaccaccaccatcaaaaaaactgggaaatagactttccttatgacacttagaattcctgcaaacacgggttagttattttacatgaagcatgtacgtgactcctggtttctgagaaaacatttttttctctctatcctacagtgctaggcaaagcaccccaaagcctcttgattttaaacacagaaaactccactgccgaaatgtttgccctatcccagcgctaaagccttagaagcaccgacgaatctaggccaaggagtacaagatggcagtgagataccacaatgcaggcaaggaagacgggatgggccccaatcgggaagcacgcgccaccagctctggagagaaccgtctgaggagacgcgggggagagtttgggtcacaggagcaggaaggaactggcaggtgtctgtcaccttatcatcccggacaccatgtttacattgtaattggcttctttacagagagggagggaccaggttcccagtgtgagtgatgtttagaggttttctgagaagcacaaggactggactttgacaggaagcaacgaggcaagagggaagctcgagaacaggttttgctgaggattccccccaagaaaagtgctccccgggaggccgttcctggcaccaagactggcggagccaccacacccgttaaagggatccacctggacagcgatcaggcgtgagccccccgaggggaagttgaagtggaagcagacgtgggtggcaaaaggctgcattgggggtctgacccagaaggaaacctgatcaggaggggggagaggctgaacggaggaaggggccggcagagtgggtagttgagtaggatgagacttctttggaggcgaggctaactacattaaactctgggaagggagggcttccgtcggaccctgggagaaaggcaggtctggagaggaaagactggcttggggggcctgcgcgtccggctctggaaggcaactcctactgggggcggcgcgcagccggcctggcgggcgagcctcgtgcggcccgggggtgcggccggcccgcgcgagctcaacaggagctcacctgggatgcgtgcggccctgtgggaggaaacttcctgggtaggtgaaagctgccccgcgggagccggcccggcaccggcagagcgcggccgggtcacagtccactcggcagcggcgcggagggcggcgagggccgcgcggggcggggcaggaggcgcccgacgaccctgggcgaggtcgcggcggccgcaggggggctccggctccggagggcgccctcccgcagtcgcacccgctttccctcacacacaccggccgcccggcccacaagccaagaagctgcctgcttggcccacaagccaagaagtcggcgaagctgagggcggtgggggagggggcaccggccggccaagcccggcggacgggcgtgtggcgttacctgtgtcagagagagctgggccgccgcagccatggtgtttccatcatgcaagggaggggaaggaagacgggctgactggggctcggggcggggaggaggcggagggagcggccgcaggcgaggccggggcgggcgggcgggcgtctcccctaacttccacaacttccctccccacgcccgccccgccccgcctggccccgcccgcctgcccgcccgccggagccggccgcggcgccgcccaaaccctggcgccggagtctcggccaccggaccagagcctgcccccggggccgccttggaaaacccggcgcggacataaaattaaagcggacgggctgcggaggcgactgcagattgacctgtgaacttcagacaggccacctacctacgctgagctcctgcttctgaaaaatgggggaaattgtaactagaggcccagttacttacaaagactaaatgagataatgatagaaaataataatggcactttatatatgccaggctctgtactagactcttattttttgaattgtatgaatgaaggaactgaaacacaaataagtgtcttactaaggtcatacagctaattatatagctgaattagaatccaagtctaactgtaaatatttaaccatctgctagtatattggaaaagaagacattaagtcattccctcccacagccaaaatccatttggaaaggggaagcaaaaatgtatttgcctggtgcctgtcacatttagattgtttaacaagggaacgctggtgcctgtagcactcctagcttctcccatcatccacttagcaaactcctccttctttctcaggacataattcaagtttcacctcctttgcaaagtatctttttctcttccttatgtcagagttacacactctcctttataacctttcttctctaccttgtgaagtcatcaccctaatgacagtttacacctatctatccctctagattaagagctcctcaatggcaagaactgttttcaatatatttctatatcgtcagaccctagcattacagtgcatgctcagtaaaggccttcgttcctgcctatattaaacataacacatcctacaccttctgatgctgccaaccttcagttggaatacccagttacttgaaattcatcttcaaagtctcagagtatataccacctacttcaagaagccttctaggaactccacaccccacctctaagttgttctgatgtgaccgtttttatactctgccttatctgtaagcgttagttgagggtttgtctccacctcactgcactgtaaaatccttgaggacaaggggctgactcactgctttatctccctcatagtttagcctaccacagaggcctcaataaatgtatttgcccgaattggtcttaatttcttagtcacgatggcttcccattacaacaaaccacaactctatcaggcctacacccattaccattatcatagcagtccccgtggtaggagggacaactgaacaagacccaggatggagttagccccacctaagtttttagactattgcctccacaagcaaaccattccagaaatttcccaaggaactcctaattctactcagactccttctggcaaaggccagctaacaagagcaagccatataggtctggtgagtaaccacttattcaagagcatcttccttggcttcttttttgctgctaatctctttaactgaagagagaataagagatactgttttacattacttcactttggtacacttatcagccataaccacaaccggtgtttctaccggtgttttctactttatattagcacatttgagcttcacaactctaaaaggaagtaatcgtcatactcactttacaaatgaggtaatgcagggtcacagaggctaagtgatttgcccagggttatacaactgatagacaaagcagcatagtatagtgaaataaataggactcagacattaggaatatccaggttccattcctggctctcccattcactagttgtatgcccttagggttgttgtgaggatgaatgagatgacatatacaaaagtgcctaaacttgtagctacacaaattatgaaatctgaaaatcatggagcaaatcgctttggggagtataatttcacttgctattcaaggggactcctccaaaccatatgagatgtaagatattcctctcagatgaataaggtggaaaccctgccatgtagtttccggaaaggcagtgcagagtagcaaagagaatattaagaatcagagtgtgaccgcaggcaaaccatttaacctctttgagcttcagtttctcatacaggaaaagtaaggaattattactgttttaacttttatatgatttatattaagtcaaaagcacaccttacccaggcatggtggcacatgcctatagtcccagctacacaggagactgaggcagttgcacagagcacgaattcagcctgagcaacatagagagaccccatctctaataaataaataacaccttgtatgtatacagtattgcttttcaccgtttataaatgtttttattttatttttatttttttgagacaaggtctcactctgtcacccaggctggagtgcaacggtgcaatctcggctcactgcaacctccacctcctgggttcaagcgattcttgtgcctcagcctcctgagtagctaggattacaggcacccgccaccacaccagctaatttttttttttctagtagagacagggtttcaccgtgttggccaggctggtctcgaactcctgacctcaagtgatctgcctgcctcggcttcccaaagtgctgggattacaggcgtgagccaccgtgcccggccaaatgtttagaagcacaacttctaatgttcagtaagtacattataaaagtttgttgaattgaactgaatacaatctcatatataattgttatttggatcttcactttatccccataagaaaatcaaggaacaaatattttataaatttattttataaatagcttctataagtaagagccattgacagcaggcttgggtcttggttaacaaaaaataaaaagaatcagatgccctagcaagggaagacttgcttaaaatctttatatgggaattgccccacgtccccttccagaccactagtaatttgtagtggcttctttcttcattcgtaggttctggtttaaattaatgacatgtaatgggagatgggagcatgtctatagggaagagaataatgggccaaattcccaaaaaaggcctagaacttctgagagaggtgtttttgtttgtttgtttgtttgtttgttttaatgacaaaccaatgacaatttgcaaatgtgtggcccagatctcgtcagagcactgggtcatatcccaaatctattttaggagaggaaaaatgtagccaatcgaatatatgttataatctaattcattataacaagaatgagttgcatggagcagacaagaagaatttatctgttttttctaggacaacttaatgtctctgggtcactaagcctcattttcctcatgattacattgaagataataatatctactttgtatggatggtttaaggattagagctcatgtataatggcctatcagagagactggcctggaatagatgttcaataagtagcagctataagataccattcttcaagatcaccatttaactctctacccttcaggcaaccctccaacaactaagttggtttgacagatatattagttacatgaatgggtctgccagaccagaccaggtggctcacatttgtaattttagcactctggaaggccgaggcaggaggattgcatgagcccaggagttcaagaccagcctgggcaacatagtgagacctcgtctctatttttttaaaatcaatcaaataaaaataaataaataaataagaataagggtgctttgaacaactgacatatccctgtcattgaaaaagtagatgttccctaggtaaacaaagttgtatctgatgacttaaatctgaatactaataaccaacaattgctgttttcttttttttgttttatttatttatttattttatttgagacagtgtcttgctatgttgcctaggctggtcttcaactcctgggctcaagtcatcctcctgcctcagcctcccaaagtgctgggattataggtgtgagccaccgcacccagacaaattgctgctttaatgtgcattatttcatttattcctcaaaacagctctacaagggttatttttaatcttttttttttaacagaagaagaatttgtccaaattcataatgacaaagctgggaattatacacaattatacacgggtcttctgattcaaatgcgctttttcctggggtgtgttgctggtgtcctgcagacattaatcaccacccaggaagacttgttaaaattttgcccttgaacatgggaagctgaagatgaggctctggatttacgatagccctaaatccaggatgagcctaaagagaagaccttaaatcataaacagctttgtcaccaatcatctttctatcctactctaactccaacccccctccccaacccatccttaaaggaaatcaaaactacttttattttcttattttctagcttttagaggcagttgtcatatcaacgcttcatgaacactgcgtgtctgtgaagtcagcatctagaaagttgagaaatgtgaagtgattgaaactatggaaaaaaaaactgaggaactctctgaatacacaaagggccagtttatttgcatgagactttgagagatgggctttccatatagatggtgctaaactgtattttaaaatcttactacaattctcatggtaatctgaagctcgtgcttctaagctgctggtttcataaatatagtccatcattgttcgcgtttgcccagggcagaaagaatatgtgaggcagcacaataacaacaattgtgctatgcaaataaccatccctgtgccagggattgagctatgaaaagaacaagcagtaagagatttgtaaatgccatacacacgcagggtgtgatagaacagttcaaaattgtcatcatcactaacttttcagggcagtgggataccctgggaagaagctgagtttaggactgggaaggcccaggttggtccagttttggtcctgcaggttctttggtgactttgcagaagtgaggaactataccaagccacggtttcctctcctgtaaactaaaagtaataataatacctacctgctcatgctattacaatgattaaatgaaggtttatgtgaaaacctgggacacagcagaaactagataagcattagctcctttttcttcctactggagaacatgtaggctttaagtaaccagaacacaaaaatagaaaatatttttaaaggttttcagtggccttccaaagcccacttaatggttttttacataaaatttatttaatccattagtaatatttattgagtactatacagtaagagagattattatatttatgtccccaaaggccattggcttctagtgagaaagcaaacactgttttgcccttgccctatttccttcctttcctctctgtcctttatgaagagtgctggaagccataagaaaccaaaaggaacaccataggaaagaaaccttgcactcatggctgcaggttctttcatctgcaggtttcaaagcattttctccataggtaattactagccctacttaccatgtgtgaatgctgagacatcatcaaattaagaagcttgccctaaatcacaaggcaagtcagaggatgggctgcagacagaacaaagctgtcctgtttgccagacttgggctctaaagtagggcacatgagtgtcaacagaagacttcaagtgatgaggaaaaaagtttgaggaatcctgattctgaatcagcgcaataacaagagcatgggcttcagagtcaaatttgatttcaaatcccagctcagccccatttgactggctgcctgaccttcatcaaatcataaactaagtctagtttccctttttgtaaaatgaggatattcttacttctaagggttttggggaaagttaaattatgtaactagtgtgagagagcctggttcagtatctgtcacttagcaggtgctgataatgttggtttatgtcattgggaaaagttaatatatctcccccacaaacacaaaataacaaatagacaactctttcagtcaaagattttcaaagccataatcacagttgtgtctcagtttaaacccatgacatctcacattatagcacaaatagaggatgccttgttcaggccttcatcacttttcttccttgattctgtgctttctctcatagcccaagtccaatctaccagaaagttctgtcggctcgatctccaatatatatccaagatcctaatttccaggtctgaccacttttcaccacctccactaccatggcctttctcttggaccactgctaaagtttcttaaccaacatccctacttccatgattttgcctaagttcattctccatatcataaactgaatgatctatttttatttatttacatcacccagctgcagtgcagtggcacgatcatggctcactgtagctttgaactcctgggcttaagcgatcctcttgcctcagcctgaatgattttttttgttctttttgagacagcatctcactctgtcacctagaccggagtgcagtggtccaatttcagctcacagcagcctccatctcccaggctcagttgatcctcctacctcagcctccagagaaactgggactacaggttcacaccaccacacccagctaatttttgtattttttgtagagacagggttttgccacattgcccaggttggtcttaaactcttgggcttaagcaatccacctgccttggcctcccaaaacgctgggattacaggggtgaacaactgcactctgcctgaatgttctttttaaaacataaaccagatcttattattttcctggttaaaaccctacagggacttctcatcaagcacctgaatatggcctaccgtgggtaaagtatgtgtcagcaaagcccagaagagcgagatgtctggttaaatggagcatggtagagatgagagagaaagaaactagcagagaagggtggaaggggtgttagaaaatacccagaaggactcatggctggactacaagaggctgagagaaatgtttctctctggagattctcttttttgtaaaatgaggatattcttacttctgaggatttcggggaaagttaaatgatgcaactggtgtgagagaacctagttcagtatctgtcacttagcaggtggtggtaatgtttgtttatgtcattggggaaagtagctcaaaagagtcccaaaaatagctcaagagattcacaatcaacactggaagcaaaggagattcttactgttttccattgatggcatttttaaatctagtggcctggaatttttaagcacccaatcaggaatctattttacccttttttttttaacttttatttttattttttgagatggagtctcgctctgtcaccaggctggagtgcagtggcgcaatctcggctcactgcaacctctgcctcccaggttcaagcgattctcatgcctcagcctcctgagtagctgggattagaggcaagcgccaccacacctggctaattttttgtatttttagtagagacggggtttcaccaagttggctaggatactcttgatctcctgacctcgtgatctgcccacctaggcctcctaaagtgctgggattacaggcatgagccatcgcgcctggcctatttacccttttaaaagtaagaattatacgctaggacccctaacatcaggacaatggttaagatgatggactttggaatcaaatttgacattgaatcaaggtcctccacttataagctacaacaccatggtcaagttattaaaactctttgaccctcagtttcatgcagactaccatacagaatgagtaaaagaattaaatagacaatgattataaagcactttgcatagtatctgagacatggggagtaagtgctcagcaaatggggactatccaatgatgatggtgatgatgatgatgatgatgatgatgatgatgatgatgatggtgattaagaattgggttatcttttttaaaaaatttttttagatacagggactcaccctgttgcccaggatggagtgcagtggtgcagtcatagctcactgtagactcaaactactgggctcaggcagttacccacctcagcctcctgagtagctgggactacagacacatgtccccatacctagataatgtttttattttttatagagactgggtctcactatgttgcccaggctggtcttgaactcctggactcaagcaatcctcctgtctcagcctcccaaagtgctgggattacagatgtgagtcactgtggctgggtgcctgcctggggtgagatttaaattggccttgtaagctaataaaaaatgaagtctattctgagggcaatgtggagtcattgaaaggttcccaggaaggaaaataaaaatccaaaatcatgttatagaaaggtaactcagccgggcaccgtggctcatgcctgtagtcccagcactttgggagaccgaggcaagcagagcacttgaggtcaggagttcgagaccagcctggccaacatggcaaaaccccatctctactaaaaatacaaaaaaaaaaaaaaaattagccaggggctgtggcacacacctgtaggcccagctacttgggaggctgaggcacgagaatctcttgaacctaggaggcagaggctgcagtaagccaagatcacaccactgaactctagcctgggggtgacagagcaagactctgtcccaaaaaaaaccaagaaaggtaactctattcagcattatactggagtttccagccagaggaattaggcaagaaaaaaataaaaaacatccatattgaaacagaagtaaaactatatttgcagatgagatgatcttgtatatatagaaaatcctaaagaaacaaacaaaaatctattggaataaatgagttcagcaaagttgcaagatacaacattaatatacaaaaatcaattgtatttctatacactagcaatgaataatctgaaaatgatagccaggtatggtggctcatgcctgtaagtcccagcgacctgggaggctgaggcaggagaattgcttgagcccaggaggcggaggttgcagtgagccaagatcctgccactgcacttcagcctgggtgacagagtgagactctgtctcggggaaaaaaaaaacaaactgaaaatgaaattaaaaaatcaattccagcccagcacagtggctcacctctgtaaccccagcactttgggaggtcaagttgggttgatcgcttgaggtcaggagtttgagaccagcctgggcaacatggtgaaaccctgtctctgcaaaaaaatgcaaaaattcgccaggcatggtggagtacacccatagtcccagctcctcagggggctaacgtggggaaatcacttcagccctccagggcagaggttacagtgaccccagattccgccactgcactccagcctgggagacagaacgagactgtctcaaaaataaagaataaaaaatatcaattccgtttacaataacatcaaaaagaaaaaatagttaagaataaatttaatagaagtacaagatttgcaaataaaaactacaaaatatcattgaaagaaagtaaagaagacctaaacaaatggaaagacttcttatgttcatgaattggaagacttaagattgttaatatggtaatactccccaaattgatctactgattcagtgcaatccttattagaataccagttagcttctttgtataaattgacaagctgattctaaaattcatatggaatttccagtaactcagaatagccaaataatcttaacaatgaagaacaaatttggaagactcatgcttcctgattttttttttttttgagacaagagtcttgctctgttgcccaggctggagtgcagtggcacgatctcggttcactgcaagctctgcctcccaggtttgccattctcctgcctcagcctcccgagtagctgggactacagatgcccgccaccatgcctggctaattttttgtttttgtatttttagtagagacagggtttcaccgtgttagccaggatggtcttgatctcctgacctcatgatccacctgccttggcctcccgaagtgctgggattacaggctcctgattttaaacttactacaaaggtatagtagtcaagatagcatggtactagtataaagagagacatataaaccaatggaatgtaattgagagttcaaactaactctatacattaatagtcaattgattttcagcaagggtatgaagataattcaatggcggaaagaatagtcttttcaacagatggtactgttgaactaccatattcacatgcaactacatattcacatgcaaaaggatgaagttgaacccctacgtcataccagatgccaaaactagctcagaatggatccttgacataaatgtaaaactgtaaaattcttagaagaatctaagagttgcttaagtataaaactctgagaagaggctgggtgcggtggctcacgcctgtaaacccagcactttgggaggtggaggtgggtgaatccctaggtcaggagatcgagaccatcctggctaacacggtgaaacccgtgtctactaaaaatacagaaaaattagccaggtgtggtggcgggcgcctgtagtcccagctacttgggaggctgaggcaggagaatggcatgaacctgggaggcggagcttgcagtgagctgagatcgtgccactgcattccagcctgggtgacagagtgagactctgtctcaaaaaaaaaaaaaaaaaaaaaacaaaaaaaaaaaacctctaagaagaaaacatagatgcaaaccatctttattagaggaggcaatgatttcttagatataacaccaaagcagagcaacaaaagaaaaattagataaactggatgtcatcagaacttctgtacttcgaaggacaccatccagaaagtgaaaagacaatccaaggaatgggagaaaatatttgcaaatcatatacctgacaagtgaattctaactagaatatataaagaacccttacaactcaacaagaaaaagacaaataaaccaggcatggtggctcacacctgtaatcccagcacttcgggaggctgaggctggagaataccttgaagccaaggagttcaagaccagcctggacaacatatcaagaccgtctcttaaacaaaaaaaaaattagccaggcatagtgagcccaagagtttgaggctgcagtgagctatgattgcgtcactgcactccagcctgggtgacagactgagaccctgtctgtaaaaaaaattaaaattatggcctggcacagtggctcacacctgtagtcccagtactttgggaggccgaggcaggcagatcacttgaggtcagtttgagaccagcctctattaaagggtgaaaccctgcctctactaaaaatatcaaaatgcctggaatcccagctactcgggaggctgaggcaggagaatcgcttgaacccgggaggccgaggctgcagtgagccgagatcaggccaccgtactccagcctgggtgacagagcgagactttgttgtaaaaaaagaaaaaaatagggccaggtgcggtggctcatgcctgtaatcccagcactttgggaggccgagacaggcagatcacctgaggtcaggagttagagaccagcctggccaacatgatgaaaacctgcctctactataaatacaaaagaactagctgagtgtggtggtgcatgtgcctgtaatcccagctactcgggaggctgaggcaggagaatcactggaacctgcgaggcagaggttgcagtgagccaagatcgtgccactgcactccagcctggtgactgagcaagactctgtctaaaaataaataaataaataaaaacatttaaagaaaaatattatttggactattgtggggaaataaactgtagatcaacaagggcagaaactggtaaaacaaatataagattattgcaataatccagatatgatgatggcttggtggtgagaggtggtaagaagtggtcagattctgtacatattgaaggtagagcacaccagatttgctaaaggattaaggatgaggtatgagaggaagaaaaggatcacggatgatgccagggattttgcctgagcaactggattgatgaaattgttttttactgagatgagtaagactatggaagaagccaatttagagagaatatcgggaatttggcctttgactaaatttgatacacttttagatatccaagttgaaatgtcaaggatgcggttggaataagagtctggagttcaggggagaggcctgggttggtgatataaatttgggtgtcattagcatatggaggcatttaaagccatgaggttgggtgagactgtccaagtgtctataataaaacccaagaagtccaactaccaagccctgggccactccaatgttaggactcagggaaatgaagaggaactagtaaaggagaccaaagaaagagcagctgagcttagaggaaaaccaggagagtatgatgtctgtccttgagccaaatgagcaatgtgtttcaggaaggagcaaggaaggaaggagtgagaaagcatgtcaaatcttatcaaagagctagttagatgaggattgcaattaatatccagagttagcaatgtggaagtctttggtgaccttggtaatcgtttcaggggaaggtgaaagaaaagtataattagaggaggctcgggagagaatgaaaagagaggacttggagtcaagaaaaacagataattctctagaaatgtctagctgaaatgaagagcagagaaatggtgtgaatacctagtaagggatacagagtcaagagaggtttcttttcttaaggtgagcaataatgcagcattttttagaaagtgaacggaatgatctggtagaagaggaatcactgatgatacaagcaagagagggaattgctggagtgcaggggaaagaattggctttgagaataccgaagagggctgagtatgtgggcatggatgcaggtggatgggttatctgctgagagggaggaaaaaggagaggatatgaaaagtttgaaaaaagttacgaaataagcatttaggaaaagtggatggacttgaaaatgtagtatgattcccaggtagcactaaaagcccacttgaggtcagtggcgatgaattttaagagtccagttgacacagttgtgggtttttcttcatccactttcccaaaggcagagagtaggtagagttagattgtgcagggtagggatcttgtgaagcaaaatgagaatgcaagaggaggcaagagagaagaggacctatcaagggagtgattttaacattggaccttggaatttaggtgggtaaaaagggaagtgaggacacaagatagttgaggaatggtgaagagatattaggatcactggattataaggcccaggaagggatcagagaagtgttggagtcagggtgttggaaggagtgagctgagaaacaggagatttagaaagataagtaaaattattgttagattattattaataattggtaattattaaatggtaattggtaattaaatggtaattggtaattaattggtaattggtaataattggtaattattaattggtaattaataaatggtagatatttattaataactggaagcaacctctaaaaaaatcatagtattaagacccagttcatgccctctaagtgctcactctgtgatgggaaagacaagacagaatgaaataaatattaaagagaagtacatgctgctgggtgtagtggctcacgcctgtaatccttgtactttggaaggctgaggtgggtggattggctgagctcaggagttcgagaccagcctgggcaacatggtgaaaccccatctctactaaaaaaaatacaaaaaattagctggtcgtggtggtgcatgcctgtagtcccagctactctggaggctgaggcaggagaatcacttgaatccaggaggcggaggtttcggtgagtggaaattgcaccactgcactccagcctgggcaacagagcaagactctgtctcaaaaaaaaaaaaaaaaagaaagaaagagaaagaaaagaaaaaaaaagagggaagtagatgaaatggctgtgggagtcaaaaggaatctgcgagtaaacgtaagggtcagatcaaggaaagcctccaaagcaggtggcatttgaatcgagcctcaaaatggagcaaatgcagcacatggcctgaataaatgttcacagttacaccattgcaatgagtgctcagaaaacagaggttggagtgcagggtgggagctatggcaggacatgagactagaaaattatctggaacaggcaagggatttttgaatgccaggctaatgcctgggcatttttttttcttttgttttttcttttttctttctttttttttttttttttgcagaggaatagataatactgaggttaggggttagaggttattattctaaataattgatgctgactgggcgcagtggctcacacgtgtaatcccagcactttgggaggccgaggcaggtggatcatgaggtcaggagttcgagactagcctgaccaacatggtgaaaccccatctctactaaaaatataaaaactagcggggagtggtggcacatgctgtagtcccagctactcaggaggctgaggcacaagaatcacttgaacccgggaggaggagtttgcagtgagctgagatcgtgccactgcactccagcctgggcgatagagtgagactacatctcaaaaaaaaaaaaatgctcccagctgtttatcatgttatgaagtcatactggtttttttgttttgaacagtctagtaattttattctccatcatgtccttaagtcatattagggaagttttatgctttggattttctgattgtctttttaagatcatctcccctctatggcaatgataatgttgtttctttccaaataatgttctgtcacatgctcattcacttttttttccaaatggccttcaacttcatcccctgatgttggtaggaaagtctaagatccctcagcagtctgaagctcctctcagaaaggggtgaggagtgggttggataggatcagaactatgctgtccagggcattcagacccgttgaagtggataagaattaaaggtgaacagtcagatcctcccagggagaggaagccacaagagacacagcctcacaactgtgttgtcacagtgttttcagaactcagtaccaataccagtgatggggccacgctttttgcaagtgacgtttattatgtcatttgaaaatatcagaatctctctcttcacaggctagccagataagtattgaaaccattaatttctctaccatgtcactgtgtctttgggcaagccccttctctcctctggacccagggtcctgcctataaaacgaaggggctctattcatcctcctctaggatccctttcaattctgacaggctctaatttttctgttatcagttattctttattaaacttacagtatgtgccagcttttttcaagatgtgagaccctctcaccctcttactcctcaaccccctgttataacttatcttgggcttttcttgtttaaaacatttggaaaaagtggtgtgttcacgggacctttatttgccctaagacatttgagggtaaatcatgtgaaggcctttgttttcttccagcagccaaaacaataaaaccaccaaattgcgtgcagcatcattttctactgccctcaagtggtggtggcccaaatgtcttttcctggttgcagtttaaggaataaaacatgttttcagaagaactctaggcatctaggagagggtaggagagtcatagagtcacaaagggcctgaggtggaaaggcccttacaggatgtctgatctaagcccctcgtcttgaaagggagagactgaagtccaccttggttctctgatcagtgaacaaacctagtttcttctgtctttaaagagctatcttatgaccctgactctatttttggctccatttctctgctcccattcacagtgaaattttctaaagagttatctccatactgtttctatttcttcatctatgctttattattattattactttttatttttttttaaaaacaaaataataatctcactctgtcgcccaggctggagtgcattgggctgatgttggctcatttcagcctctgcctatgggttcaagtgattctcctgcctcagcctcccaagtagctgggactataggaggatgccaccacacctggctaatttttatatttttagtagagacagagtttcaccatgttggccaggctggtctcgaactcttgacctcaaatgttaaccccccaccccgccgcccttgtctaccaaagtgctgggattacaggcatgaaccaccgtgcccacctttacactttattttttaactttttactttgaaataatctcaaacttgcagaagagctgcagaaatattacaaagaattcccagatgccccagaagttctcatgtgtgggcatatgcctacatgcatatacatggatatgtatattttttcctgagccatttgaattgcagtagttacccctaataccttaaatatttcaatgtgtattttctgagaaaaggacattctcttatatacctacatacccactcagtatgacaatcaaatccagaaattttaaattgacatagtgcttatatacagtccatactcaaatttcactaattggcctgataatgtcctatatagcagtattttcccccatcaggttctgatccagtgcctgatccaggtaatgcattatacttaactgtcatgacttttaaaaaggttttttttcttttaattattattttttagaaacaggatcgcgctctgtcacccaggctggagggcagtggttcaattacagctcacttacaaccttgaattcctgggctcaagcgatcctcccacccctgcttccagactagctagctagtaccgcaggcacgcaccactatgcctggctaattttttaaaaaattatttttgtagaggtggggtctcgttatgttgcccagactggcctataattctcagcctcaaagtgatcttcctgtctctgcttcccaaagtgctggaatttcaggtgtgagccaccacacctagcctgttataactctttagtgtcctttaatctagaatagttccccagtctttcactattattcacgatattcacatttttaaagagtactggccaggtgttctgtagtgtctccccctgtttggctttgtctcatgttttctcatgaagggatttacatatttttccaggaagaaatcctagttatatgatgttgtgtccttctcagtgcatcatatggggagaaacgtggtgtcacttggtcccattattgatggtgttcactttgatcagcggattaaggtggtatctaccagatttcttcactgtagagtattttttcctgtgtaagtaatggtaatctgtagagagggactttgaaactatgtaaatatcctgttcctcttcaaacttttgcccaatggtttcaacactcattgataattcttgtctgaatcaattactgtgatagttgcaaactggtgattttctacttctatcattccatctacattttttagttggcattctactgtaagcaagaaggtttccttctctctaattattatcatgagtataaactaatgtattcttaatttatttaatgagttataaacattacccttattattttttaaatgttcaacttgtcccaggtttggccaatgagagcctcttcaaactagctcctgtgtccttttgacatgtcttcatcacttttttttaacacctccttgctttctggcataataagatgttccaggcttatcttgtactttcactgcctagtcctgaaaatcagccatttctccaaagagctactctttagtggggaatggtatttagaaaccaagatttgggcatcagatgtgctcattcctattggagtgtaattgcttctaggccattttagtaaacagagccaaaggggaaaaatagtaacctaattttgtttaattattattataattatttttaacagagacagggtctcactctgttgcccagactggagtgcagtgatgctatcatagctcactgcagatatgaactcctgagatcacctcagcccctggaataggctaggactacacgccactacactcagctaatatttttaaattctttatagagatggggtctcactatgttgcccaggctggtctcaatctcctggcctcaagtgaacctcctactttggcctcccaaagtgctgggattacaagcatgagccactgcacccagctctggtcaaccattttaaattaataattcattactgatactttaattccaatttaacaccacagggttctttctcctattccttatttgcatctcccttttcccacagtaagaactctggctctcaacaacatcaatgtctttattcatttgtttaaaattatgatataggctgggcatggtggctcatgcctgtaatctcagcactttgggaggccaagacgggcaaatcacttgaggtcaggagttcgaggccagcctggccaacatggcgaaaccccatctctactaaaaaatacaaaatttagccgggcatggtagtgcatgcctgtaatcccagctactagggagactgaggcaggagaatcacttgaaccttggaggcagaggttgcagtgagccaagatcacgccactgcactccagcctgggcaacagagcacgactccatctcaaaaataaataaataaataaataaacaagatagacacaaaatagaattgttacatccattctgctaacaaaaacaatctactaaacagggttcaagatttgtttgcagttttgttttgtttttagacaaaagctgtatattcaagtactatgttcaaaagtatttagattcattttttttccttcagagtgattatattacttatttaaatatagtttggttcacttgtttctgtttatattcagttttaggatcccttccattcttgtttatttaattccgtttttaaatatgtaaaggtaaacattgtcacaaaattaaaatctatacaaaaggcatatagaatgcttcacagatgtgtcatccttgtgtaggagtcaagccaattttctctgtattgttcctttttttttgtaaatatgctgtcaaagcaagcacacctctaattcattcttcaacttatttaattcttacttagaccacccacttcactgaccctactactgccaagatcatcagtgtccaatattttctttagtcttatttgacctttccactcagctgacctctccaattttcttgaaactttctcgtctcttggtttttgtgataccacattctgctgatttactctctcttcgcaggtctgtcctcactctctttgtctattccaccaccctaaaatcctctggactcttcttggctctcttcacttctctctgcagactctcttcctagatgatctcaactatttctttgtcttcaaatgctgatcatgctaatgacttccaaatttacatctttttcccagacctctcttctggtctccaaaatgtgtaaccaactgtctaatagacatccacttggatgtcttaagacatctcaggtttaacatatctaaaatagaactcctaatttccctgccaaacctgcttcgcctcgagtcctaatctctgtaaatgtcacttccatcccccggttactctagccagaaacttagaagttattcttgattcttccattttcctcaacccccatgtccagtccatctgcaaaatatgaaaattttacctccaaaattatgtgaaattagtccatttctctctgtgtctaccaccatcacttcactcgtcatctcttacccaggctactcataagcctcataactggcctcccctcacctattctttaccctcttccttttatgcccccacattcattctccatacaccagctacaatgacctttctaaaaacaaaataataatacgaacttacatttattagtgtctattatgtgccaggaactgttttacatgtatctaatctatacaacaactccatgaagtaaaacccaaatctacctcaattttacagataaggaaactagggcagagagagattgagaaatttgcccaaggtcacacagccttgggcacacagccagtaaatggtagaacttaggtttgaacccaggttgacttcttagccttcaagcttatctgccacactatgctagatcatgtcactacctagcatcaaatatttgatggcttctcactacactggaactaaattcccaactccttaccaaggcctagagaggcctgtgtgatctatcgtctgcctgtatctccaaactcatctcatgcttccttttcttttcctttgctccatccacatggctttcacaccgcaacccccatcatcttccttgaacatgataagctctttcctgccagcaggccttaaacatcctctatctcaagtattcttctttttttcttttaaatcccctattctgagaaatgtcaaatattgttttctctgatcttcacacagctggatccttctcattctttaggtctcattttaattttctgtccagagagactctccctcccattgctttttttaattattattttaaattttttttttaaagctggacaccattaattagaatcatgctatttcttaagtaggtccctccctactcctgccaagatcattagtgaccctccctgatatgttccatcttggccccatatttgttttcttcttagcctttaaaacaatttgttagccgggcgtggtggttcatgcctgtaatcccagcactttaggaggccgaggtgggcagatcacgaggtcaagagagcaagaccatcctggccaacattgtgaaaccccatctctactaaaaaaaaaaaattagctgggcgtggtggcgcacgcctgcagtcccagctactcaggaggctgaggcaggagaatcacttgaacctgggaggtggaggttgcagtgggccaagatagcaccactgcactccagcctggccgcagagcaagactctgtctcaaaaaaaaaaaaaattttttttgttggccaggtgtggtggctcacgcctgtaatccagcactttgggaggtcaaggtgggcaaatcacttgaggtcaggaattccagaccagcctggccaacatggtgaaaccccgtctctactaaaaatacaaaaattagccaggtggggtggtgggcgtctgtaatcccagctacttgggaggctgaggcaggagaattgcttgaacctgggaggtggaggctgcagtcagccaagatagcgccactgcactccagcctaggcaacagaatgagactccatctcaaaaaaaaaaaacaaaaaaaaaattactcaggcatggtggcgcgcacctgcaatcccagctattcaggaggctgaggcaggagaatcgcttgaacccgagaggcagaggttgcagtgagccaagatcatgctattgcactccagcctaggcaacagagtgagactctgtctcaaaaaaaaattgtaattatttatttgtttgtttgcttgtttgtctctcttccccactaaaattaagtgttgtgaaggcagaggctgagtcttagtcactttcattatgttcagagccaaacacagtttccagctcatagaaggaactctagaaatatctgttgtctatccatatattatcttttctacttcatagatctgttcattcataatttctgcttctttatcactttggtttgtcatcatctacactccatctcctcccacacatacccctactcaaactcatggcctctctctttacatcctgttagtcatagtttttattgctgctaattgcctcaatcacctcatgctgcctgattcaaattcctgacagagaaatattgatttgtccaactcatattttaggagccaagacacatttgtaggtcattggcaagcccatgggttgcttgcctttgggtcatattcccagtcttagtccagaagctgtgttagagaaggctgtgggtggggatggtcagcatagtgctgcctttctgcaaggatgaggatgtagcaggcttggtgactgatatttgagcaaaagttgttgcagcagaagcaacaaatagttaacaaggcctcacttaagggctgggcttcccagtagttgctctctgggaggaaggtctcaggttatggtcgagtccagtttactctccctctggggagaatagtaaacacaaattgaaagcactcacatttacccagcctttttttttttattttttgagacagggtctggctctgtcacccaggctgaagtgcagtggcacgatcttaggtcactgcaacctctacctcccaggctcaagccatcctcccacctcagcctcttgtgtatctaggactacaggtgtatgtcaccatgcccagctagtttttgaatttttagtagagatggggtttcaccacgttgcccaggctggtctcaaactgctgagctcaaagcagtccatccaccctggcctcccaaagtgctgggattacaggcttaaaccactgcacctggcatatacagcctttctaaaattgcaaaaagagcatttttatccatctgcatttatacctccagtgaggtaaagagtagtttccatttaacaaataataaaactgaggctgggaagatagagtgctatgcctaaggtcccacacacactgagtaagagtcatcattacatcccagatctctagactcccacgcaaggtctcctttcactatacatatcttgttgccctcatttcctacctgggactttaatcttgaatcacagctcaagggatttttaagggcaaccatttgaacggccagtgaaaagttctaaaacagcttgatgataattgaagtttcctataaggcagcactcgataggtaggttctatgggctctgggctcccagtataattatcaagtgtctaagaatttatggaataattaccatgtgccaggcactctactttatacatactctctcaattcaacctcacaacatgcatgtaaggtatatgttattataatcccaactttacagatgaggacactgaaacttaagaaactaggtcactggaccaaagttcaaaatctagtaaatacagtgctggaatcctaactcaggtctgtctgactccaaagcccacctcccttttcatgatcagcttgattttgtcacttgatttatgtgaacttccacttccttatcggtaaaatggggatatcagggcctaattcatgggattattgtaggtttatgaacaatcacatagagggcaaacctatttcagtaaacagagcagatatacactatctttcagtatagtctgaaactaaatccttcatgtgtaaaaagaagcagaattatcaactccaggtgcctataagaaacaggatttttcttgtgagactgtaatcctggggcaaggattcctggtccaaattctgaaaacataaggcctggagagaaataaccatttctccaaggaaacagatcaatttattgtatctcagagatgagaaagaacgtgcacttaaactagtcttaatgcatcaggatggaaattagtaaatgcccaataaagagatttgaatttgtgtctgataaacttgagatcttctcctaggccaaggccttttgcatataatcttcttaatcctaccacaactctaagaggcaggtcttcttacaacctccatttttcaggcaagtactttgagactcagagaggtttttttgttttttttgagacggagtctcactctggcccccggactggagtgcagtggcgccatctcagctcactgcaaccttcacctcctgggttcaatcgattctcctgcctcagcctcctgggtagctgggactacaggcacgtgccaccatgcccggctaattttttgtatcattagtagagacgggatttcaccgtgttagccagggtggtcttgatctcctgacctcgtgatccacccgcctcagcctcccaaagtgctgggattacaggcgtgagccactgcgcctggcctcaactttgaggctcagagagtttaagtgacctggcaaaagtcacacatctaactcaaagcagagaagaaactggagccaagctttcagctgtgtgcagtctggccagtctgctagtaagttagctgcctcagcactgtagacctctttggaaggaaactgacccctaggtcaaacatagtgctgacatcatgcccactcattattctcaagaaatgaaaatcaattctacgtccatcagcacactttagggagaatgctggctaggacaatacttcccttgcagcattatagataaataccaacacctaaacaaatgtcaataataccatgtgatgaatgcaagagtgagaataatgactaaactttgcgtagcacttgatgattcacaaggaacattcatatctgttacccaatttgctgttcatatcaccccttggagataggtattatcattgccatttcacagatgaagaaactgaggctcaaaggagtttatttcatatgagagaagatgtgaagctagctgtggtggcacacacctgtaaccccagctacttgggaggttgaggcagaaggattacttgaaccaggagcttgacagttcaaaagtttgagtccagcctgggcaacatagtaagactgaatctctgaaggaaaaaaaaagaaagatgtggacatataccattttacgatctcttagcctccatttcccttcttttgggactggtactctgtgtttcctttgaagatcaaataacccttgcttcagcaacattgattcgatcagcgtgaacacataacacttgactctttgagaatcaagcttggaactttcgtgtaggcttttgttcaaactgttgagagagagaagctctcttaagcccatgggtgtgagtctgaagttaagggctaccaccataaggaaaaaaattatgtataaattttaaaccagcagaagataattcagcctattcaatggaaagcagaaatggagattaaaaataaaaaaagaatgtagagtaaatggaggatagaactaaatcttaatatataataataacattaaatgtaaaaaagtgaatctcaccaatgggatttttaaaaattacatccaacagtaaactaactttaagagacatgcttttttttttttttttttttttttgagatggagtttcactctgtcacccaggctggagtgcagtggcttgatctcggctcactgcaacatccacctcccaggctcaagcaattctcctgcctcagcctcccaagtagctgggattacaggtgcccactaccactcctggctaatttttgtatttttagtagagacagggtttcaccatgttggccaggcttgtctcaaactcttgacctcaagtgatctgcctgccttggcctcccaatgtgctgggattacaggcgtgagccaccacatccgacccagagacatacttaaagagatagattaaaaataaaaagaaagataaaccaggcaaatgtgaactgggttgcgatcttattatctgtcaaagaggaattttagtttcaaaagatgagatggaaagtcattattttttcttaaaaggaacaatagacaaatacatagatacaacaggcaaaacacacagatgcacctaatcatacagtcttaaaatatacagaactcaacctggacaaacatggcgaaactctgtcactactaaaaataaaaaataaaaaaattatccaggcgtggtggcatacacctgtagtcccagctacagtcccacctgtttcaaaaaataaacataactgagccaggtgcagtggctcacacctataatcccagtgctttgggaggctgaggtgagaggataacttaaggccaggagttcaagacaagcaccatagcaagaccacatctctataaaaaataaaataaaaatttaccagcatggtggaacaattctgtagtcctagctactcaggaggctgaggtgagaggatcgcttgagtgcaggagtttgaggccagagtgagccatgatcatgccactgtattccagctacacacaaacaaacacacacacaaaacaactgcagagaaaaatcaagagatgcttaattatagctgaagactttaacatccctctctcagaaactgatatatcaaggcttgaatagtataattaccatatgtcaacaattctacatcgtataagagtagactctaggagggttaaaaacataataaatgtgaaaaactaacaaagaaaaatatgagataattatagtttgtgactgaaaaggaaaggcaaaacttcaaatgcacagactgtaagacaattttttttgagacagggtctcactttgtcacccagactggagtgcagtggcgcaatctcagctcactgcagcctcaacctcctgggctcaagcgatcctctcacctcagcccccaagtagctgggactacaggtatcagccaccatgctcggctaatttgttgtgtttattgtagagatggggtttcaccatgttgcccaggctggtctcgaattcctgagcgcaagcgatctgcctgccttggactcccaaagtgctaggattacaggtgtgagccaccacaccaggctataagacaaaaatattgatgaatataatgacattaaaattaagaatttctgttcaacaaagaagattgttgaacaaaataactagataaaagacaacatggctgggcgcggtggctcacgcctgtaatcccagcactttgggatgccgaggcgggtggatcacgaggtcaggagatcgagaccatcctggctaacacggtgaaaacctgtctctactaaaaatacaaaaaattagctaggcatgatgaagggcacctatagtcccagctactcaggaggctgagacaggagaatggcatgaacccgggaggcggagcttgcagtgagccgagatcgtgccactgcactccagcctgggcgacagagccagactctgtctcaaaaaaaaaaaacaaaaaacacaacataactagataagagaatgggagaatatgttcaaaatacgcaacacacaaaactggtaaataaataagagggcagcaaaccttaggaaaaaataaaagcaaaacatacaaatagttggcatgaacattatcaccaaaaaaagagagaaaaagatataaacagagaggaattccaaaaatcaaaaggcatatgaagagatgcccaaagtaccacagaaatgctaattaaatcagcaacgtactatccttttacatctactaagctacagaaattagaatgcttgataatgccagctggtggagttgtggggatgctggaactctggtgggtgtatggactggtacagccactgtggatcacaatctgacatgaagtatgcaaattcagaactcatacactctatgagcttgcagttagactcctgggatatatcccaaagaaattcttatgcaggcacataggggttctgcattaaaatatttattgtgtgctatttatggtcatagggattcaaagacaacctggttatcatatggagaggagatagctaaaatgtggtagatgttgtattgtaaaatattatgcaacaatcaaaagcaatggattagatgcatacacagcaagatgaaggcattttaaaacagtgctcagtgaaaaatatgaagaaaaaatgcgattaaaacatgatgttatttgcagaaattaaaaatgtattaatacaaaacaaaaattcactttttataagaacagatacaaataaaaataacagacactttaaataaaacttaattatctaagtgggaaacagaaaaggaataaaagagaaaaaaatggacaaataggtagggcacggtggttcacctgtgaatcccagcactttgggaggccaaggcaggtggatcacttgagccgaggagtttgaaaccagcctgagcaacatggcgaaaccccatctctactaaaaatacaaaaattagctgggcatggtggtgtgcagctgtagctgtagtcccagctacttgggaggctgaggtaggaggattgccttgaacccaggaggtcgaagctgcagggagccaagattgcactactacactccagcttggatgacagagtgagatcctatctcaaatatatatatataaataaaataaaataaaatttagaagtgacattgtcaccaaccaaagatgataaactaccatgtactaagtagtgtgattaattaaatcctcaaaactggaaggaaatataataatattgtatattatacaataataatattaactttcttcctaatacatatgttgactccagatttctacactgaatacctattaattttcaaaattaaatatacaatcataatttttaaaaaaatcatctggaggagtatggttcagttgcagaatggtggtgttcaaaagatgtgtcctggaaagaaacacaaaaaatttcagtctatgtgcagaatgggtagaattatgcaggcatttttttcttgttaaaattacaatttctttttgtttggtttggattttttttattttgattttttatagagacagagtcttgctgtgttgcccaggttggtcttgaactcctgggctcaagtgatccttctgccttggcctcctaaagtgctgagattacatgtgtgagccaccacacctagcttggtttttatttttttgaaacaaggtcttgctctgttgcataggctggaatgcagtggcatcatctcagctcactgaagcctctatctcctgggctcaagcgatcctctaacctcagggtagctgggactacaaacatgctccacgatgcccagctgatttttaattttttcgtggggatggagttccactatgttgcccaggctggtctagaactcctgggctcaagtgatcctcctgcctcgacctccctcagtcctgggattacaggtgtgggccaccatgtctggcataccataatttctgaaacagtgtatgcacagtcaatcaaaataaaaggcaaaagaaaatttatcaaaggtgagagcagcagctttaaaaaatattcaaatgaatccttactgtaaacaaggattacaaaatcctgcctgaaaatatcttcatctggtgatactgaaaatatgtaacaattggtagagcatacatctgagcaatcagagcagacatttatagtaaacaatgctcatatcagactggcatccctaaaatataaatcaccatccacaccagtcctccagccccaaaacaaaatatttagcctcagcccctgaagcttagctctttttcacaacaggaagactctcaggctgtagaaattggtataaagtcaagttttccaaaccagaatattccaaaggttgtaaggtctagaaaccacaccaggcaccagtctacagggaggaaggaagaagttctcactgctgctccctgaactcaccaccctacttcctgtcatctggtgctctgctctttgactctgaaatctggtccacacatccccttctcctttgggcagacttgtgcattcttttttgtttttaaccttcccccaaagatgcacactcatgcattctttaagagccgcctcaaaactcacttccttcatgaagtcttttctcaaaccaccaaaactaccaggcagaaaattgttcatttattcaactaatttttactgagcacctactatgttccagatcctgcacctgctatgttccagagccctggcttatcatttactgaactgtatgacagccatgtctgtgggtctgactccgtggctgttggatatagtcatttaaaaatacatttgaagggcaggtacactggcctacgcctgtaatcccagcagtttgggaggctgagatgggcagatcacttgaggtcaggagttagggaccagcctggccaacatgacaaaacactgtctctactaaaaatacaaaaattagccagatgtggtggcacacgcctgtactcccaagctactcgggaggctgaggcaggaggatggcttaaaccctggaggtggaggttacagtaagctgagattgtgccactgcactccagcctgggcaacagagcaagactctgtctcaaaacaaaacaaaacaaaaagcacttaaaaaggcattttttttccatgtggaatgtcggttgcctactttatgtattcaatagtaatagatattcactcactcattccacagcctggtgcagtggaaggataaactgttttcttttatagtgctttgttagagttatttatagggttattgttttatggaagtataaacttcgaaaccagacaagcttgagagactggtcctgtcccttactagctgtttaaccttgagcaagtgacttacccactctgagcagtttccgcatctgtaaaatgaagataagaatggtatcctctacaatggctgctatgaggattagatgagcacattgtagaagctccacaaatttatggcaaagtgctttctaatctataaagagctacaagaatgtgcatgatgacacgtgagcaggtagtacagaaaaaaataaatatgagactagcaaacttgcaaacaagtgacaattatttaaaagttagggcacaaaacagcagaaaagcaaatagattttcacaaagtattttttcttatgttagggggaaatctagttgttaagtgcttgatacatctgcaagaggaaaacatcatctgtccacaagtataaccatcagcactgctcagtaaatactaatacatacgtttttattttattttattttatttattttttgagacggagtctcgctctgttacccaggctggagtgcagttgtgcgatctcggcccactgcaactttcgcctcccaggttcaagcaatgctcctgcctcagcctcccaagtagctggaattacaggtgcccgccaccaagcccagctaattttttgtatttttagtagagacagggtttcaccacattagccaggctggtcttaaactcctgacctcaggtgatcgacccaccttagcctcccaaagtgctgggattacaggcaagagccactgtgcctggccccatacatttaaacaaaataaaatccttgggtgtcctgggataaattgaaagtgaggattaagtttatacagaagtttatttactgataactaatttcataaacaccataataatgatagtagtgatagcaaccattttttgactacctatttgtatcaggcactttacatacattagttcatttaatccctacaacctcataaaacagaaatgatcactccctttctactaataaggaaacagaagccccaagaggcagtgtgactttccccaggtcacacagagcaaagggagcgggatggaaatacaaatccaaagtttatttcaaaaaagtaagttattttgctccccaaattgtaccaacctcatgaatatttctcctcctaacatttgcctccacaatcccagttacagttcacccttctggtcaacaaggacttcctcatttttacccagaaacactctgtcagcatcatgttcctgcatctccctgtcatttcctggctctgtagtgggatccaattcatttccctcttcttcaattccccaaatgccatcttccttttcttcatccgtttccttttacttcttggcctcttctgcctgctttcttttttcaatttcttcataaagttctctccattgcttctcttaggtcctgtttagaatgtagaatttcaaaataatttacagatagtataaacaaagttaaccaactttagaaatatctggcatcttccaacagtcatttatttatttatttatttatttatttacttatttattttttgagacagggtcttactctgtcatccaagctggagtgcaatggtgtcatcttggctcaatgcaacctccgcctcctgggctcaaggggtcctcccacctcagcctcctgagtagctgggactacaggcacatgccactacacctggctaatttttttttttgtatttttcatagggatgggggttcactatgttgcttaggctggtcttgaactcctaagctcaggagatccacctacctcagccttccagagtgctgggattacaggtgtgagacaccgtgtccagccttccaacagtcttcagatttccgggatagtgtttatttacatacaaagtttcagcatgtgtagggtgaatagaaatgtgtgtgtgtgtgtgtgtgtgtgtgtgtgtgtttagtttgttcgtaaataaaattggttccaatttagcaaatatttgttgaatgcctactgccttgctaaccacagtgctataataggcaatctacacacgttatgtatattcctcacagcaaattatgaggtttgttacttgttctactttctagatgagcgatctgaggttcagacttccttatacttttcttgttggtctcctcaaactgaaagtaagccccatgaaggtagaaacttctctgttttatttcactactataaccccagcacttacaacagtgctttgaacaggtactcaagtacttgtcaagtgaatgtatggtttaataataatagctaccatgtattgagcacttactatataccaggaacttataagatagaggctatcattattctccacttatagatgaagagcagttaaataacttgcctaagttcatacagctaatacataatggagcctggatttgaactcaagcagtctagctccaaagttcaaactcttaaccaatatgaaaaagtaccttcacaaaacaattttagatataatcccaaagtaaaacaagacaaaaccagactaaaaagtattacaaggtctaataatttttcccagaatgactacttcaattttttttttagacggtggctcatgctgttgcccagattggagtgcagtggtccaatctcagctcactgcaacctccgcctcccaggttcaagtgattctcctgtctcagcctccctagtagctgggattacaggcacccaccaccatgcccggctaatttttttatttttagtagaggtggggtttcaccatcttggccaggcttgtcttgaactcctgacctagtgatccacccacctcagcctcccaaagtgctgggattatagtcgtgggccaccatacctggtctttccatttttttttaaaggaaatactaagtatcaaagttctttaaaaaaaaaaacaaacttttttttgtgcctgtgtttttgcaggtgctttaagcataagcttaatctgcctattgggtaatcaagtattggccacaaacctgcttttgaatggaccttccttcagaaccagaacatctggatagagcttgtcagggtcatgaggccattgccccaagtatcactccacccacaaaatagttctaggaggccggggaagctggtaaacaaacagcactcattaccttccttctttctcgtagccatcctgagcctgagcctattttctgtaatcccaacactttgggaggctgaggcaggtggattgcttgaacccaggagttacagaccagcctggacaacacggcaagaccccatctctacaaaaacgttaaaaaaaattaacctggcatggtggcatgcatttgtagtctcagctacttgggaggctgaggcaggaggatcacttgagcctggggagttgagtctgtagtgagctgtattctcaccaccacaccccagcctgggccaagaagcaagaccctgtctcaacgacaacaaaaaccaaaacaaaacaaacaaaaaaaaagaaaatgagctcagtagctcccttctagatcaatgcactacagcagatagtctgacacacaaaaggagcatgagaggccaggagtttgaaaccagcctgggcaacatagcaagatcccatctctaaaaaaaaattttttttttttgagacagagtttcactcttgttgccaggctggagtgcaatggcgcatctcggctcactgcaacctccgcctcccgtgttcaagcgattctcctgcctcagcctcccgagtacctgggattacaggcatccgccaccacacctggctaattttgtgtttttaatagagacaggggtttctccatgctgttcaggctggtctcaaactcctgacctcaggtgatccacccgcctcagcctcccaaactgttgggattacaggcgtgagccaccccacctggccaaaaaaaatttgtttttaagttagctggatgtggtggcacacttctgcacttctgtagtcctagctactcgagaggctaaggtgggaggattgcttgagcccaggagtttgaagcagcagtgagtcacaatcacaccactgcactctgtgcagacacaggaagactctgtctcttacagatacaggtataaatataaatacatatacatacacacacagagggagagagagagagaaactgcagggaaaaacagatgcataattgtagctgaagacttgaacatcctcctctcagaaactgagacagcaaggcttggatagtataattaacatatttcaacaattctacatcctatacaagagtagactctagacggttaaaaatttaataaacatgaagagtaaaactataaagaaaaatataagagactcatagtttgtgactcaaaatggaaggcaaaacttcaacaagtcaaaggctgcggatgactttgggtactttatactctgaatttcagttcctacacctgaaaaatggaagtaataatatctgtcttgctggattgttttagggctaagtgggatagcgtttggaaagtgctgacagagccacaagtacacaattatagatgtccagtgaacatgagttctttctcccacctctcagggccgagtgaccaaaaatgagacaaagactatgtggctgatttttgaaatgcaaagaatagtgaacaactgaggagtcagacattccccaggtcttatttctaactttttgagcaaactcttcatcatttgtaagaaggaaattgtcaaagatgctgacagattttacctgttgaagtgaaaacaacaggattattaaaactaggtgcctaaatgtcgaagggcttaaaaagcacctggagacccttgctaaatgcatattcccaggctactggcccagaggttgtaatcaataatttgggttagacaaggaaatacaagggttattaataacacagagggtccaaaatcctgtactgccctagctgatctgctctagaacaaagttaatttagtttcccaagaatctatgctccttatgcctctgaacactattttagaaggttgtgaagtaacttttatcactctgctagcctccaaattggtgcccactggctcttgctccagctcagattgatagtgcctacttctgatgatacttacatatagatgcctttaaaaaggtggctgggcgcagtggctcacccctgtaatcccagaactttgggaggccgaggcgggcggatcctgaggtcaggagttcgagaccagcctgaccaacatggcgaaaccctgtctctactaaaaatacaaaaattagctgggcatggtggcacgtgcctgtaatcccagctactcgggaggctgaggcaggaaaatcccttgaactagggagttggaggttgcagtgagctgagatagcgccattgcactccagcctgggcaacaaaaaaggttctctccttaatcagaaaaactaaaagaccatagtaaaaggaaaaggttcaacaagaaatgcaagcagaatttaagattctttttttattttatttttattttttgagagggagtcttgctctgtcgcccaggctggagggcagtggcatgatcttggctcactgcaacctccacctccttggttcaagtgattctcctgcctcagcctcctgagtatctgagattacaggcatgtgccaccatgcccggctaatttttttttgtattttagtagagacagggtttcaccatgttggtcaggctggttttgaactcctgacctcaaatgatccacccgccttggcctcccaaagtgctgggattacaggtgtaagccactgcgcccagccagattctatacgatgcagatcatgtactatagttctctatttttttaaaataacatttttaatatttacaatggaaggaaaagattaatgaaatccatcatatgtaatattttccatgtttgtttattgaatgagaaaggaacagaatacaaagaacacaagtcatggagtcagaccagctcaaccacatactagctgtgtgatctcgggcaagtttgctcaatccctgtaagcctagtccctataagtaaagtagggaaaataataactccctgacagtaatttcatgagacttagcgataatataggtaaagcacactgtctagcagttaattgtcacccaatagacactagtggctattatcataacttttcagtacctgagtatgtttcaaaaagggcaaaatgatggtcattttataattttttacttttgcagtaagttaaataaatcatgaagtcaatttcatgggagtatttgtataaccaactggaaagtctgtagcatgagtaatcccatgtccctccctaggctttgaaaaaacccctgccttgaactcatggagttagagagcagaatgataattaccagagactgggaagggtgagagtggagctgggggtagggtgctatgagtagtggagatggttaatgggtacaaaaacataattaggtaatttcagaactttgggaggccgaggtcaggactttgagaccagcctggccaacatggtgaaaccctgtctctgctaaaaatacaaaaaattagctgggcatggtggcggatgcctgtaatcccagctacttgggaggctgaggcaggagaaatgcttgaacctgggaggcggaggttgcagtgagcagagatcttaccactgcactccagcctggatgacagagtgagactctgtctcaaagaaacaaaaaaaaagtatatatatacacatatatatgtgtatatatatacatatatatgtatatatatatctcaaactaagtagaatgaataagatctagtatttgatagcacaaaagatggctatagacaacagtaatttattatacatttaaaaacaactaaaagatgtaatgggactgtttgtaacacaaagacagggtaaatgcttgaggtgatggataccccatttaccctgatgtgattattacaagttgcatgcctgtatcaaaatatctcatgtaccccataagtatatatacctactgtgtacccacaaaaactaaaaattgaaaacaaaaacaaaaaaccctgccttactgtttcatggccaaaaaagttttcttgtttttaataagaaaggcttttatttggcttacattacccaaccaaccttgcctccaagagaaagacaagtgataaaatagccactttgaatagagataactattttgctaggagccaatttttaacaattggtttttaaaattccttctgcatctttaagatattttcttacctttgggatttttttgagttgtcagcagtcttgttaggagaactgcctatttgttggcttttccattttccctactttcatgagaactactcctaatctctctggtctttttagtgcccctttgcccccattgcccttacattaaactcatgggctatgagagtgccagttctgcatcctaactggtaatcatggtctacttgtatcttctctgtaaaagaactgtgaactgtgttcgactaaagcctaaggccctaaggaattcattgaaagttacctgtgctatcccacttgagtaataacatgtaaagagtataggtttgggcacttgttagagatgggccctgacaaatcaagtctcctcgctgagtcctcagtgttctcatcagtaaaatggcaacggtaagtcctaccctcttggcctcacagggatatggcacagaccatatgatgtaagggatatcaatgtgctttgtattattgaaaccacctttgcaaaaattatgacagtgagaaaaatctgacataggaaaattgtgacagtgaaagaaatctgacctaaccaactctatcttgcttctaacctccaagctgcccttgttcattcctggccataggccaaactaactataggagaaatttagtttataatctaatttaaaaaaaaatcatgcctgtaatcctagcactttgggaggccaaggcgggcagatcacgaggtcaggagatcaagaccatcctggctaacacggtgaaaccccctctctactaaaaatacaaaaaattagccaggcgtagtggcgggcgcctgtagtcccaactacttgggaggctgaggcaggagaatggtgtgaacccgggaggcggagcttgcagtgagccaagattgtgccactgcactccagcctgggtgacagagccagactccgtctcaaaaagaaaaaaaaaagataataacagccccttcccaaaacaaaccccctccttccttgcttggggaccagactgcctttgtaaactaacaaaatagaaattatgactcaggagtcatgcagccagaggccacctccccaattctcctatagataacatcactattgtaaaacctaagattggtatttgaggtatttttccgactctgcattctgatgcagagtgcagctggcactacccaaattgataaactggctcatctggtcttgtgacccccacccaggaactgactcagctcaagaggacagctttgactctctgatttcaccctccacccaaccaattggcattccccattccctagcaccccgcctgccaagctatccttaaaaaaatcctagcctccaaattttcggagaggctaatatgagtaataataaattcctatccttccgcttagtgagctctgcatttattaaactctctgttgtgaaaacttgctgttctcagtgccccggcttttctgggcagtgggtcagatgaacccattgggtgatgacattatgactaggttatactcattgtggctagactatactcattccttcaaagatcataaggagtcccaatggtaagaggaaaattttctttgttctctaccatctcctcccagcctctgtgctgatttaaaaaacaaaacaaacaacaacaactaaaaacaatgcagtcacttccaccaaagaaaaaaaggtaaaggggttgtgtttggaggtgtcagaacagggaacaggaggggtcagggattaggcaggaaagttgaccatcttactaggctgggaccaaggagggatggggaggggatctgggctgccagagcatctgaaggctggaaattggggcaggggaaggtgagggaattcccacccatctccatactgagagtcacttggatttccaataaagggcagggaccccatggtaacctggatgttctgggctggctgagtgtgggggtgggggttgcgggggatggtggagtaggacctgtgagtgtcagacccgattagaagttagaagaaaacatgctcgcaagggtaatgtcagcattgtgcagaattctctctctctctgtctctttaaaatacagacacacacatacatacacacacacacacacacacacacacactcctcacaaaattaagagacaatgctggagttttagaaatgtagtctcttgggcttcactgcagacctactggatcagtatctgtattttaataagaccccccattttattcatatgcatgttaaagtttgagaagcactcctctggcatggtttaaattcttcaaatactaaggtttgcctgcttacagaggttgatagaacccagagcaattagtgtcaaatacttttaattttgtatatgaacaaagatacagtttaaaatgtgtaccttaatgttttcagtggggggataagcattttaatgaaataatcagattaggcatattaatatggtcacatatgtttacaagatgtagaaagttctccttatgtattaaaaagagacaactgtaaaaaaaaaataacaatgcaaagtgtatccacattcttcaaattagataggaagaaaagaaaagaaagatacaatgtgtcccttcctcccttccttccttttcttctgaacccttccccactccccaacacatgctcctggttatttacatacatgacctccttgtactcctatgttggtcttcttaagccagagaagcaagaaagtataaataaataaagtagaaaataaataaacaaactaagaaagcttcaaatagagggcgtctgtcccagaaaccttcggtggctctgaactgtagaaatcactgatcagagacactgagacacgtggccatgggactttgcaggatatacccaaggacaggtggctgtggcttccagaggctctgttgtacagtgggtgtaatcaatacagcaaaggctttagaggctgacagacctatgtttgaatcgtgtctctaccatgcgttagctgtgtgctcttggacatgtcgcttggtgtttctgagtctcaattctctcaaacataaaatgaggaaataataagggataatagtacttaccttatagagttgtgagaatttggggaggtaatgtaggtaaagcactcaccccaggccagtgtttaacaaaagtgagttcccttcctctccaggggaattcttcatccaggactttgtagattatagtttctaacagactcctgggaggaatcatggccaaggcctttactctggggccttgagccactctcttttctcctgatttggggaggagtcctccccatctttcttaataagtctcagagaagaaagagatggagaggacaacaactttttaaaggctggcgtattggtcccctcctttttaccttccaattaaaggaaagaagactggcagagagagggaagctgggtcaggacttatcatcatggctggggcaatcacccctaacatctgtccgggaattttaatgtttcagagttttaccacatctctgatttccctttatccctagaagcacctccaaggatcacgtaggaccagcagaagcagcgtaaagtattggaactttgaatctgacatcagaaagacctgcactcagccgggcacggtggctcacgattgtaatcccaggccgaggcggtggatcacttgaggtcaggagttggagaccagcctagccaacatggtgaaaccctgtctctactaaaaatagaaaaattaggcaggcgtagtggtgcatgcctgtagtcccagctactcaggaggctgagccaggagaatcacttgaacccaggaggcaaaggttgcagtgagctgaaattgcatcactgcactccagcatgggtgacagagtaagtgagactctgtctcaaacaaacacaaaaagagctgtacttaaattctagcttttctacttaccttaacagatgtatgtcttcaggcaaattatttaacttttctgagtctccttttcacatttagaagtaggagactttcacagtgtcatattttcacccccatcaatattattgatgcttgctcattttctaatgtgggacctgaaatttaccaggtgcttaaagaatctttttgtttttcagattcactgattctaggtaaatcagaggaacaagcaacatgaacagaaaaaatgtagaaaatgcaattatgctgaagtacaattgttgtttcagaagtccagcatctggtgtacttaacaatagagaatatattaaatttttccaaaataaaaaaaacaagtaggagactcgctagtgaaaattaaatggcatatgcaaagtctttaatacagcatttggtacatgagagggactcagtaaattttagtaacttataattattaggaagactatgactgcccccatttaaaagatcagcagtctgaggcttataaagaccaagacttattcaagtcttgtgatttccagcctgaggctctttctactttgtgaaaactgagagactgtggctcagtggctctgagctcagagggctttacctgccaaaggtccaggctgagaacactaatgttataatagtgacaaatggtggcgtcaggcttatatttagggttgtctattttgggatgaatctactccccctggtaattgggattttcaatgatccaaggtttccattctccctaagcaaagaaccagtgaacaaggcattagtattttgtcattcttctgatctcatgcaatcagaaaggccaattgatatggtttggatctgtgtccccacccaaatctcatgtcaaattgtaatccccagtgttggaggtgaggcctggtgggaggtgattggatcatgggggcagagttctcataaatggttta

SEQ ID NO: 19 - DNA, 86012 bp, Homo sapiens
agacaaatttttaaagggagggtattattttaactgcttctttgctcttttatcttttgtcctgggtgacaggaactagataagctataccccagagaaagcgcctgcagcagtacggtgcctgggcccttgatagtccctcagcacatcattttcctttttcctaccttatcttccttttatatttgaaggctcgtgaatttagagtacctaacggaaattttagttttaggatttcaatttgaccaaaacaacgctgagattttaattgcctctattaacccatggctctcaaacccaaaggaaagaaaccactggagggggtgggggagaaaggaggcggtgcaaaaactgaaaagaaaggcggagaggaagcggtagaaggaagctttctctgtcgggtttgtctttttttaaccccagaaaggcgtgacgtgctaactgccgtcgcgggttagagtccgcggccaagcccgcgcccgcccacaaagtccccgccctccctccggcttccgccccgccgtgcgctgcaggccgcggccgctgggggcgcccccgacccccgaggcgctgaggcggcggttcctcgagcctcgcctctcccgactcccagacgggcggcagcggcggcggaggcggcggcggcggcggcggcgagctgagcaccaaaagggcgctcacctccccgggcgagctgcagcacgaccgctccccgcgggcggtcggggtccgcgccgcagctgccgccgcgttccggcccaggctgccgcgagaggcggcggcagcggccccggccgcggccggcctgcggcgccccccggccgcgcccccgcgcacagctcgcggccccggccatggggctgggctgatccggggctcggccaagctgaggcggcggcgcccggccgtgcgcccagcttgcaggcgcctggctctcacgatgatgaagaagaagaagtttaagtttaaggtggacttcgagctcgaggagctctcctcagtgcccttcgtcaatggggtcctcttctgcaagatgcggctgctggacggcggcagcttcaccgccgagtcctccaggtaactcgcctcccgcgccgcctcgcccctttctgcttggccagggcttgttggatgggcagcatctctccttggcccatttgctcgcctttccctagggaccgctctaaaatcagtcgaatttattgatctgcaaagtgctttgcaaatgggttcttctcagctggccttggttcctgcgctcctgactccagatggtgcctggtatctgctcttccctcccaaatcctctaggaatgggagcaatggccagagagggaggatgcttctgttttctcttaagacatttccatatttgtgaaatgcaaagtagaacttgagctgttaaaaactaaaataacccaaactgcaggagttccaagagcccagctctgaacagaaacctgtgcttagcacaattccttctcccttgtagattacaaggggacttggccacccactctgaggctggggtaggcctggccaggcttgacttgagtcaagtgctcctggcagacgagacaacggtctgtgcctcatcagagagcggcgtctccagttaggcgctaatgctggatgaattagtcttgaagtggccactagtaggtctccttgtgggagggcttagagccagatggggagcccaggccctgccctcattttaaaatgagcccctgggcactcccagagagaggcattagcaggttacagaatgaagctattaaataataggtgtggcattaataataggtgtggcagtgtttcttgagtaatttcagagctactcacaggttgacagatgtaccctaaggtgctttctttaaaatatatacatagagagagaaaacaattttttaaatgaacttttgagttcctgagatcaagaagggttaaaagttaatgttattttgcccatatatactggtcttaggctttatttctgccctaaaaatattctacttaaaaaaaattccgtcatcccatttatagtataaaggaaataatgtcactggattgtggaattggggctagaaacttgtctttggggcaatattgaagcctatggaagccagaaaatgtctagttggctaaaccaaaggatatatgaaattaatagtttgccgaagacagtttttaaaattaaactgtggtgacacatcagtggatattcagctaagtattttaaacacctgtaagagaagaatgtaacctattttggtgcaaaaaaaatattggaccatctcttacttgttgaaaagcctaagccgattcgtgaaggtcctgttggtgcaggtgacagtcttgccctgaggcctagactgttttgctgcagggtgccacccccgacgccaggcagttagactggcgctcctgggccagtggtgacacctggtggtcagggcacttgtctacggggcttccttcctacctcagttatgtttatttggcttacttcccacaagtcacttattctttcgttgtaggcagtcatttattcagcaaatatgtgttggcttctaaatatattatcttatttaattctcatagcaagtctataaggtaggggttccatttcgtagataaataaactgaggctcagaaagcataactaactttcctaaggtcccctcagctggtaagtgcgatgccaagattctgatcaggtctgtgtaacttcaaacagggtggtgccagataaaggaataaatcgtgtgccatatatgaaagtttctgaatagggagcttcctaatgactttaatgagcaaggggtatactccgcaagacttagaaatgaaaaagttgagtatcttgggttaaactcacccctttttcttccaattaaaatttgactttgatcaatttgattttaagtaagattaggaatagtgctctgtgtagccaaaccaaaaagccatatagtatgggggaaatgactcacaataaggagcctgtgcctttgacattaggtagagatagttggtgtaaagctaagagcaaggatttggaatgcggtgagtctaagcctaaaccccagttccactgtggtaaacctggatgggttacttagagtcccaaaacttctgtatgtaaaatagaaaccatcactgacatgtggtggtgtgaggatttagtgagatgatgtgcccaaaacacctaaacagtgccttagcacccagttggcatttaaagaggagaccaggaacttgtccaagaaggtccatttgcttgagatgttatatttgattcctttatcctaacaactacaaaattgttggtttgagaaagagacctcattttacaagaaaaaaaaaaaagaaaatctgaaatatctaaaggaagtgaattatttcaaaatcacagaacttttaattagtgggtgccagtcaaggcagtgcatctctaattgaacgctagattttaacttctaaaaaattgctgtatgtgccccttaaaagtcaggtgtagttaacactgtaacatttctcctgtaaaaatatgaaatgaattacatagaaaagaggtaatatagcaggcccaagactgctattcttagaaaggcctatgtacaaggctggcccttggctggcatctgggagcttgaatggtaaatggttccatacatgatacaaaactttacgtaaatgataagagtggctcactgtgcctagactgtacggagtggtttatgctaaattccatctggaattttggttcttgctaggcagcctacgtgaccagccctaatacaaattttgggcattgagtctctaatgagtttccctggtagacagcacatcacaatttaattctagagaagttaagtgtgtgctgattcgactttgtatcttttcattgtaataaaccttagccatgagtaggactgtatgctgagtcctgtgagtcctaatgaatcaccaaacttaggattggtcttggagactccctgatggatgaacctttataaaataatactcatcttgctacagaaaagccttagaggcacacagaaaattgcatatatagatataaatagagagacccaaatatatataggtcatatgtatttgatatatatattaatatatttggctttgtacaacaactaaacatgcagatcatttattcttggccaagtattagttgagcatttaccaggtttctattaatagctctccatctgggattgtgagaagtacaacaaatataaggatccacaagggaattacttctaatgaaattagatcatagatgtataattgcttgacagtagaagacagtgtgacttagtgcccaatcaatggatcagacaatatattgagtgttgttgaaattctaaagcaaaagagttaatttacaactgtaatggttactgacaaccacattggcatttctgtggagcactctgggaggatgagtttgcattgacaaagtgaggatgggaggacagcttgagcaagtcatcaataggagttgataatagatcagcctgattgcagagcgttcatgttgaatggaagcagaagataagattagagaaagactttgaatactgttgtaaagagtttctttctactctctttctataaatgagagttgctttctactgctcatagggtaaaattaaacctaagattcttgaactgagttgttgtgtggttaaagtggcgtatcacctggctgacaggctgatgctatctgtattcaaggttgggtgggggggaaattagagatggggagacaaattaggaggctattaaaataacccaggcaggagctaatgagaacctgaactccgaggtgtctcatgtaagtgactgataaatgataatcttatgacagatgccttgacgccaccacagaagtaaagaagtcaggaaaattatttgttttgtttaaggggaatattgcatatggtggtggaagatatagtgggttaagttgtatgcttagcatgctacatttgaggtgacagcctgatgagtagtgggaggcatttatgcggtatgtggatttcttagatgttgtctattggagccatataggcctgcttactaaacttatttagaatttccttacattgtttttacccttttaaagattattagtgaaaaaaggccaggcatagtggctcatgcctgtaaatcccagcactttgggaggccgagacacgcggattggttgagctcaggagtttgagaccagcctgggcaacatggcaaaaccccatttctacaaaaaacataccaaaaaattagctagatgtggtggtgggcacctgtaatgccagctactcaggaggctgaggtaggaggatcgcttgaacccgggaggcagaggttgcagtgagctgagatcaccaccactgcactccagcctgggcaacagagtaagactctgtctcaaaaataaataaataaaaataaagattattagtgaaaattaattttagaagccagtttttcttggtattgttttcaatgaagagattggaaaaatataaagactaaaaggtaattatttgtaataaatattattaaaatggtcagggtaaattgtcagatttttacatgccatagttaataaaatatttggaaaatacattgtacgattatggtggtctattcaactgaggctaaattgttgtctaataaaatacagtcatgtatcagttaacaatgaggatctgttctgaggagtgcatccttaggcgatttcatcattgtgcaaaagtcatagagtgtacttacacaaacctagatggtatagcctactacgtgcttagactatgtcgtatagcctgttgctctgaccacatcgtgtatttggtctgttgttgaccaaaatgtcctcatgcagtacatgactgtatttctgaagatgtttcaaaaggacagtattattgtatttaaatcttttcaccgtacttcctttgcaaaagcatttaaatcacttttaaggtttattaaaactggcatggcaggtttaattctggcctacttaaacaaaggaataataggaagaaattttttctatatcttttagaattccctagtttgccttattttgttcatctttttttttgtgctgatagccaaatagttttctaagtttcacatgaggctgtggcagaaacacatgtgaatttggggagtgtctgggaagctgatgagcacatctatgtattggaccttttactctaaacaagcggaaaggatttctttcttttggccagagtacatccttctgttttcaagattttagttcactgcacattgtgtatttctttttagtaaacatttctttattgaaaaagtaatacagattcatatggacaacttagaaaatagaaaggcagaaagaaaggaacaaaaattgcccataaatgaaccacccagggataatcactattataaatattttagtatagaaattaggagcctttattgatctgtacacatacatgtatgaccacactcccccacacaactatcacataccctttttaagccaaaatgagattatactatacttagtatggttttttacttcatgtatcttttcatatcattaaatattcaattacaagattattttaatggtgcatattattctattgtatgagtttccatgacttattgaaccaagtcacttttgaaaggctttctcctttcctttcttttttgttaatagttttataaataaactacaataaacatccttataaccaagcttggtatacatccattattatttatttaggattaacacttagaaatggaattatagagtcacagggcatgcagatttttaagggttttgatatatattaccaacttgcccttcagtgcattaaattgattttttaagattagtaatcactaataagcagcaaattatcaaaagttactagtagtagaaagtactgtctgaccatatggcacagaattatttatacactagatccagcaaccccacttctgggtatacattcgaaggaattgaaatcagtatgttgaagagaattctgtactcttattgtctttgcagcattatttacaatagccaagttattgaaacaacctaagtgtctgtaaacagatgaatggataaagaagatgtggtatatacaatggaaattattcggccttttaaaaaaaaaaaaggaaatcctgtcatttgtgacaacatggatgaacctggaggacttttgtttaaaatgaaataagccaggcacagaaaggcaaatactgcatcatctcacatatatgtgggatataaaaaaggtgaactcatagtgggtgagggcacggagagatggggaactgttggtcatagggcacaaagtttcaattaggtggcatggatatgttcagatctgttgtacagaatgctgactatagttaataataatgtattatacttgaaaattgctaagagaatagatcataagtgttctccaacagcaaaaaaaataaatatgtgagttgatggctatgttaattggcttggtttagcaatttcacaatatatacacatatcaaaacattacatagtacacagtaagtatatacaatttttgtcaactatattttaatatagttaagtaattaaaataaaaaattttttaattaaaaaattccttataccctgaccagaaatggagtcatcaattcacattattataatacctgtaataatagtagctgacatttatttgagcactttcccagtgcgtcaggaacttttctaagcctttacatttaatcttcaagatattcccgtgaggaaggtgctattattacgtcattaccattattagtgcccttgccattattgctgctattactctcattttatacctggggaaacagaagcacaaagagatgctaaaagttactcagctagtaagtggtagagctaggaggcattctagctccaaggaccactgttaatcactaaattctactgcctttcaggctttgtgttgtatgctttctcatttttatgttttataaaaatggtaggtaaatatatgtagtataactttttctgaatgtcagtttcagaaaactggttccaatatgtgacatcactaaacaggttacaagacctggcccctttagattttccctgaggcaattgtatatgaaagataagtaaaatgcagcgaggcatttttatgggctcatgcctgtaatcccagcactttggaagactgaagcaggagggtggcttgagcccagaaattcaagaacagcctgggcaacatagtgagaccctgtctttgaagaaaatttaaaaattagctgggtttcgtggcatgcacctgtgttcccagctactcagggagactgaggtgggagaatctcttgagcttgggagattgaagctgcaatgagccatgattacaccactgcactccagcatgggtgatggagcaggactctgtctcaaaaaaaaagaaaagaaaacaaaagaaaagaaaaatggtactcatgccactttttttttcaagatgtggctttgtacaactaagttcacaaaatttagtcacattattggatagtcatatcttataaaaatagtattaatgccattttacaccagtaagttaatattcaccactgtatcactgagccttacatagccagcattttgtaaatattgaaagaaagcaaatattgggagaaaagatctgttgtagttttgctaaagatgacacacatacagagatcactaaattaaatatatggggaagtagatcatgttttatctacacagcttgtaaaaaattatgttcggtttggggtgcaggcctttgagggttatcaaatggaggtccaaggaagatattcggattcttaagaatcttgaattatgctaataacaggagactggggttagtcttgagagaagataatggtcttcaaatactaaaaaattgacttgtatatatgtatattttacattcctaattttatttgattcttacaaaacccctttaatagaagtaggaaaccattgtcacctgtttttgatttagaatggatgtcaggtgctataacaaggtatttttaaaaaataactggcttaaccaagatagaagtttacttctctttcatatgaagtccaacctagtgtggtagctgtgctctgtccagttgtcaggggcctggactctttttgtcttattgctctcagggtattgttctcatccacagggactgacttggctcaccccacatccgaattccagccactgggaaggaggagaggggaagggaaggtcccttgtgctcacagtccattgaccagaacatcagcaccatgccacatccagccccaaggttgagaaatttagtttttgctgggtgcctgtatgcctaacgaaacactgaattagaataaagggaggagaggacagatatcaggataattagcctctgtcataccactcttttagacatgagaaagttgatccttagaaaataatttgttcaaagtcacatatcaactaatgaaagatatttgaaaaattgtgccataaagaaggaatagactatgctgggtgcagctgaggacagaactaggaccagtggggagatgttaaagaaggcatgtttctattcagtataacattaaaacaaataagttctaacatttaggagagtaaaatagtgagtagactacctcagtactactaacagttgaatgacctcatccatttgtcaggaatgttattcctcgttaggaggatgggtcatctagatgatgatgctgattattctttttagaggcagttactctgttgcccaggctagacaggcttgagtgcagtggcacgatgatagctcattgcagccttgaattcctgtgctcaagcaatcctctctcctcagcctcccaagtagctggggctacaggtgtgtgccacatgaacatgctaaattttctatttttgtagagatgtggtcttgctatgttgcccaggctggtctcaaattcctggcctcaagcaatcctgcctcagccgcctaaactgctgggattacaggtgtgagtcactgtacctagcctcacctaaatgattcttaaggccctttctaactccaaaattctatgactaagctttcaattttgtcttttaatactactcttcctaaatctttcactatagctgggactggacagcttatatcagccaattatgtgtgcatttgtgtctctttgatatcctctccttcacccttcttttagtcagtccacatttcagccattctttaagatctaaatcagttatcttctcagttttatacccatacgtgtccaacctacagtccacccacggctcctaacattactacacatactgtatccttaattaatgttggttatttgttgaatgaatgaaaacttttctcaccatcccactgtgatttcacttgtcactcaattcttacagttcttgttgctaccagtcatttcacaccaaatttactcttttaattaccttcatgaaaaattaccatacagtgtacaatttgcagtaataaatataaactcaagaataggtagaaaggagaaagtgtttaactgggattttttgtgggggtgaggtcaggggaagtgtcatggaagagaattccttagcagggtttttttaaaagtctagctggaggagaaaacagaatgataaagggaacagaagacacagtgacatgaagcagcatgttgtgttgagggcacagtgggtagagtggtgtataactgctgccacatagaggaagggagaggaagtggtcatttcaaggagcctagacttggttctgtgctgtagtctagggagccaaaagcagggagtgatatgcaaagttagtggtttggtttagggttggaattgaagagaattctcatctgacacatgaccttagctttctcagtagcaaccaagaaaggtagaataagggatgtgaggataatgatgaaagatcagaaaagcttccacaaggaatgggagaggaagctgaccaaagacaagtccaaaaggcccaactgaaatttaaaaacatgaattttaatgatggcagtatacgtgttcatgcagttttctccagcagtgcttgtatgtcagggataggaggcagtgggtagtagaattgattcagatttggaagtttatgggtatgtggaaaggcagttgggagtactggtgagaaaggaatctaaagaatcagtaatggggtccagatttcatatggagcaaaaccaggccaggaagataaataaggaaaatatggaacagttggaggatgaaggccttagtgatgttaaaggaagatatgtgtggaaggaaagatgctgtgcagaattagttggtggggaggggctgtactcagagtgggatattaacgcttgggattacttcagtagagcaggccacagttggcagggtatggatgttgctgagatggtgtgaagaatggcatagggcaaagaaccgtgagtctagggcgtgttgtttgcatgatattacgatagccagaatgattgcaggtgttggagtgaagagagaaaaattgcaaaacagctacttcactgtcacatcaacctggaggggaagagtgtgacataagccagacatcacgtgcctcaagcttttaaaccctaagcttgaaagtagtagagttacagcctgcaagtggcaatgagagtgccggcactgcctctggacctgtggaagatgggggtggagaataaacatcacctctgctgtaggggtacaatacagctagtgtcctcgtgagatagccaggtttcggttagacaataagaggagtgttctatgaagagactaagagtatgagggtttgtttaatcctagaacagaggtttcaggtggttatcgtggaatgagttgggagagagaggagcaacagaatgagttgaagtgaggaaaaacagaacagtaggacagagaagattgaggatttagggagaataggtgaccaagactttcatcttagatttttcctacagattacagggatgaaaggtataatttgaactgactggcctcaaaattttcagtgtggatatgaaataatttagtgtcaagtgatacaagacagtttctctggctgctacttcttggagtgtaaaaatgaggttgcgttaggtcctgccgcccacttcctaggaggtcatgccttcttttattgtccatccctccttttattgtccgtccttcctccttactgtctcacacccctctgctgacaaacttaatcttcatcctcaccagtcttttaactattatttcagaggatgaactattcttccttctgttccttgccatttctctgtatctttgatcctgtccttgtttaccttccttctccttctctatacaattctgatacaaacttcatgagaaaaataactacatttcctgtctcttaagcattcctcctctgccctcaatcctgcactctgactgctgccccagcactcaactaaaactgtttttgctaataccatcagtcatccctgattgccatgtctaatcagtattttctcatttgtacctttgtactgtgtttgaaacattctgaaaattacctatttcttgaaacttgactatcttgacttccatgaatcctattcttcacatctctaattccttctctgaattgcttgaaggcacttcttctgcctgccctttttttatagactttattttcagagcaaaattgaatggaaaatacgcagagtttccatatacccactgcttcccactcacatagcctcccccactagcaacatcctgccacacggtcgtacatttttgccagtagagaacctacattgacacatcattatcacccaaagttcacagcttacattagggtttactcttggtgttgtacattctagggggtcggcaagtatctaataacatgtgttcaccaatctagtatcatacagaatagtttcactgccctaaaaatcttgtgtgttccaccttttcattcgtctttctcctctaatccttgatttatttgatttattttattttattttatttcttgagacggagtctcgccctgtcgcccaggctggagtgcaatggtgcgatctcggctcactgcaacctccacctcccaggttcaagcaattctcctgcctcagctgcccaagtagctgggattacaggagcgcgccaccacacccggctaattttttttgtatctttagtacagatgggctttcaccatggttttgccttttccagaatgtcctatagttggaaacatgcagtatgtaactttttcatattggcttctttcacttagtaatatgcatttaaggttcctcttccttcatggcctcgtaattcatttctttttagcactgaataatagtaattatctggatatactatggtttacccattcatctacatatcttagttgcttccaagttttggcaattatgaataaagttgccatacatttgtgtgtgcatgtttctgtgtagacataagctttcacctcatttggttaaacactgaggagcatgactgctggatcatatcagaagagtattgcccacccatctttaaaggcttccacaggatttgtgaggcaatgagggcaattattaggattctactttgcaaataaataaagatcagaaaaggcaaatgatttacccaacattatactagtagtaagtgatagagcaagtctaaaattcaagattcctgccgattcatccaagactttttcattatcttatgtgacctctttattacgtaacagagaaatagagtttagatttctcacctggaggtccaagccaagaactgctacacaacccttgaaaaactacagtacctcatatagccttggctgggaaagggaataggctggaaaggtaactacagtctttgttagggcctttagtgatgaggatattagagtctccaataaatccaagaatttgtttgtatttacaatgtattaggccaagagtggaaaggcaactcatagaatgggagaaaatatttgcaagtcatatatttcataagagattgatatcaagaataagtaaagaactcctacaactcaacaacaaaaacaccaaacaacccagtaaaaactggacaaaggacttgaatagacatttctccaaagaagttatacaaatggccagaagcacaagaaaaggtatacagcatcacttatcattagggaaatgcaaatcaaaaccacagtgaggtatcacctcttactcattaggatggcaactatcaaaaacaaaaaacaaaaacaaaaaaataacaagtgttggcaatgatgtggagaaattagaacccttttgcattgttgggaatgtaaaatggggcagcccctatggaaaacagtatggtggtccctcaaaaaactttaaaccagcaattcttctggatgtatacccaaagaattaaaagcagggacttaaatatttggacacccatgttcatagcagcattattctaaataactgaaaggtagaagaaaactaagtgtccatcacaggatgaatggataaacaaagtgtggtatatacatacagtggaatattattcagccttaaaaaatgaaggaaatgccaatacatgctacaacatgggtgaacattgaggacattatgctaaataagccaatcacaaaaaaaaaagacaaatactttatgattctgcttaaatgaggtaccaaaagtagtcagagtcatagagatagaaagtagaatggtggttgccagggcctgtggtagggaaaaatgaagagtttaatggatatagagttttggttttgtgagataaaaagagttctggacattggacactactgaactgtatacttaaaaatggttaagatgggccaggcgtggtggctcacgcctgtaatcccagcactttgggaggccaaggcaggcagatcgcctgagatcaggagttcaagaccagcctggccaacatggtgaaaccccgtgtttactaaaaatacagacattagctgggcgtggtggcaggtgcctgtaatcccagctactcggaaggctgaggaggagaatcacttgaacccaggaggcggaggttgcagtgagctgagatcgtgccattgcactccagcctggatgccaagagctagacttcgtctcaaagaaaagggggggttagatggtcaattttatgagtattttaccacaattttttaaatgaataaatatttcatcccctccaaatgtttattaggccaaaccaattatttgtacattagtatattcaactaatatagactccattaaaaaaaagttttctcttatttaaacttcataatttaggaacatttcattatgaatttttctgcagtagcaatgatgagttcctgcaatcattctatcaactaatgcgatttagtagaatatacacatatgggcttaaacagtaattgatttttatttaacagttttagaaaaatccctctgtcatatgataactgtttaacatcagaggaattgtcagactgttttttaaagaggctacactgaaaaatgctttcctgatgaagattcagtgttgctatagcactctttattaaagtggtttttcacgataagcacaagtcaaaatgttattagagtcaaaatgtctgacattctatcatcccatttttgcccttcctggttaaatcctactaatcctttaaagcttatagatgccaactcttctaaggagtcttcccgaatttctcagctaaaattaataactcccttccttctgggaactttcagggattggtaggacttaaacagaaaagggaaacagttaccatatgactcagcaattccactcctaggtggaatgaaattctgtattcaagagaaaagaaaatataatgtcacacaaaaatgtgtacatgaattttcttagcaccattatttataacagccaaaaagttgaaacaaccccagtgtccatcagttgatgaaaggataaatgaaacctgatgtatccatagcatggaatattactcagcaataagatgaaatgaagtactgctaaatgcaacaacatggatgaagcttgaaaacatcatgctcagtaaagaagctagtcacaaaaaaacacattctatgattcaattgatataaaacatctggaataagcaaaatctacagagacagaaagtagattagtggttggctagggctgagggattggagagaaatgggcagtgactgctagtggatatgaggtgtcttttggaggtgatgaaaatgttctaaaattgactggcgatagtttcacaaacaatatactaaaagctatggatttgtacacttaaaatgagatatgatatgtgaatgatatgatatgtgaattatatctcagtaaagcaggcttttccattttaatgttatttgttttgtgtgtgtgtgagatacaggtgtcactgtttgcccaggctgttctcaaactcccgggttcaagcaatccgctcacctcagcctcccaagtagctgggaccacaggcacacaccactgtgcctggctcctaataaagctttcttaaaaaagcattttctgacaaaattcccctaaactaatataattcctggacaaattcattttttaatttagcaaatacctgcctacggtaatatcttgttttatctatttcactttattgtgctttgcagatactgcattttttttattatactttaagttttagggtacatgtgcacattgtgcaggttagttacatatgtatacatgtgccatgctggtgcgctgcacccactaactcgtcatctagcattaggtatatctcccaatgctatccctcccccctccccccaccccaccacagtccccagagtgtgatattccccttcctgtgtccatgtgatctcattgttcaattcccacctatgagtgagaatatgcggtgtttggttttttgttcttgcaatagtttactgagaatgatggtttccaatttcatccatgtccctacaaaggacatgaactcatcattttttatggctgcatagtattccatggtgtatatgtgccacattttcttaatccagtctatcattgttggacatttgcgttggttccaagtctttgctattgtgaataatgccgcaataaacatacgtgtgcatgtgtctttatagcagcatgatttatagtcatttgggtatatacccagtaatgggatggctgggtcaaatggtatttctagttatagatccctgaagaatcgccacactgacttccacaatggttgaactagtttacagtcccaccaacagtgtaagagtgttcctatttctccacatcctctccagcacctgttgtttcctgactttttaatgactgccattctaactggtgtgagatgatatctcatagtggttttgatttgcatttctctgatggccagtgatgatgagcattttttcatgtattttttggctgcataaatgtcttcttttgagaagtgtctgttcatgtccttcgcccactttttgatggggttgtttgtttttttcttgtaaatttgttggagttcattgtagattctggatattagccctttgtcagatgagtaggttgcgaaaattttctcccatgttgtaggttgcctgttcactctgatggtagtttcttttgctgtgcagaagctctttagtttaattagatcccatttgtcaattttggcttttgttgccattgcttttggtgttttggacatgaagtccttgcccacgcctatgtcctgaatggtaatgcctaggttttcttctagggtttttatggtttttaggtctaacgtttaaatctttaatccatcttgaattgatttttgtataaggtgtaaggaagggatccagtttcagctttctacatatggctagccagttttcccagcaccatttattaaatagggaatcctttccccattgcttgtttttctcaggtttgtcaaagatcagatagttgtaggtatgcggcgttatttctgagggctctgttctgttccattgatctatatctctgttttggtaccagtaccatgctgttttggttactgtagccttgtagtatagtttgaagtcaggtagtatgatgcctccagttttgttcttttggcttaggattgacttggcgatgcgggctcttttttggttccatatgaactttaaagtagttttttccaattctgtgaagaaagtcattggtagcttgatggggatggcattgaatcagtaaattaccttgggcagtatggcctttttcacgatattgattcttcctacccatgagcatggaatgttcttccgtttgtttgtatcctcttttatttccttgagcagtggtttgtagttctccttgaagaggtccttcacatcccttgtaagttggattcctaggtattttattccctttgaagcaattgtgaatgggagttcactcatgatttggctctctgtttgtctgttgttggtgtataagaatgcttgtgatttttgtacattgattttgtatcctgagactttgctgaagttgcttatcagcttaaggagattttgggctgagacgatggggttttctagataaacaatcatgtcgtctgcaaacagggacaatttgacttcctcttttcctaattgaataccctttatttccttctcctgcctgattgccctggccagaactttcaacactatgttgaataggagcggtgagagagggcatccctgtcttgtgccagttttcaaagggaatgcttccagtttttgcccattcagtatgatattggctgtgggtttgtcatagatagctcttattattttgaaatacgtcccatcaatacctaatttattgagagtttttagcatgaagggttgttgaattttgtcaaaggctttttctgcatctattgagataatcatgtggtttttgtctttggctctgtttatatgctggattacatttattgatttgcgtatattgacccagccttgcatcccagattcaccgaagttgaaatgaaggaaaaaatgttaagggcagccagagagaaaggtcgggttacccacaaagggaagcccatcagactaacagcggatctctcggcagaaaccctacaagccagaagagagtgggggccaatattcaacattcttaaagaaaagaattttcaacccagaatttcatatccagccaaactaagctacataagtgaaggagaaataaaatactttacagacaagcaaatgctgagagattttgtcaccaccaggcctgccctaaaagagctcctgaaggaagcgctaaacatggaaaggaacaaccggtaccagccgctgcaaaatcatgccaaaatgtaaagaccatcgagactaggaagaaactgcatcaactaacgagcaaaatcaccagctaacatcataatgacaggatcaaattcacacataacaatattaactttaaatgtaaatggactaaattctccaattaaaagacacagactggcaagttggataaaaagtcaagacccatcagtgtgctgtattcaggaaacccatctcacgtgcagagacacacataggctcaaaataaaaggatggaggaagatctaccaagcaaatggaaaacaaaaaaaggcagtggttgcaatcctagtctctgataaaacagactttaaaccaacaaagatcaaaagagacaaagaaggccattacataatggtaaacggatcaattcaacaagaggagctaactatcctaaatatatatgcacccaatacaggagcacccagattcataaagcaagtcctgagtgacctacaaagagacttagactcccacacattaataatgggagactttaacaccccactgtcagcattagacagatcaacgagacagaaagtcaacaaggatacccaggaattgaactcagctctgcaccaagcggacctaatagacatctacagaactctctaccccaaatcaacagaatatacatttttttcagcaccacaccacactgcattttttttaattgaagatttgtggcacctctacaccaagcaagtctgtcagtgctgtttttccttgtttttttggtgtgtgtgtgtgtgtgtgtgtgtgtgtgtgtgtgagagagagagagagagagagagaaagaaacccactctcttatcacccaggctgcagtgcgatgatgcattcttggttcactgcagccttgaactcctaggctcaagcagttatcctgagtagctgagactacaggtggatgccaccacccccagataatttttaatttttctgtagagacaaggtcatgctatgttgcctgggctggtctcgagcacttggcctcaagccatcctctcacctaagcctcccaaagtgctgagattacaaatgtgagccactgtgcctggctcagtgctatttttccaacagtgtgagctcacttcatatctctaggtcactttttggtagtttttgcagcatttcaaactttttcattattgttacagctcttatgatgatctgtaattagtgatctttgatgttactgttgtaattgttttggggagccatgaactgcacccatagaaggtggcgaacttagtagtgttgagtgtgctctgactgctctactcactggccattccttcatctcccttccccttctgggacctccctattccctgagacaaaacaatattaaaattaggctaattaaccctacaatggcctctaaatgttcaagtgaaaggaagagttgcacttctctcactttaagtcaaaagctagcaatgattaagcttagtgaggaaggcatgttgaaagctgagataggccaaaagctaggcctcttgcactgaacatttagccaaactctgaatgcaaaggaaaggttgtagaaggaaattaaaagtgctgctccaatgaacacatgaatgataaggaagtataacagccttattgctgatatggagaaaatcttagtggttggacagaaggtcacaccagccacaatattcccttaaaccaaattcccttaagcctactccctaactctcctcaagtctatgaagtctaagaggtgagggaagtgcaaaagaaaagtttgaagctagcataggttgattcacagggcttaaggaaagaagccatttccataacataaaagtgcaaggtgaagcggcaagtgctaaagtaagagcgcagcaacttatccagaagatctagctaagatcattgatgaagggggctatgctaaacaacagattttcaatgtagacaaaacagccatctaagacttttgtagctagagagaagtcaatgcctggcttcagaacttcaaatgacaggctcactctcttgctaggagctaatgcaactagtgactttcagttgaagccagtggtcacttatcaatgtgaaaatcctagggtccttaagaatgatgctaagtctactctgcctgtgctctataaatagaagaacaaagcctggatgacagcacatctatttacagcatagtttactgaatattttaagcccactgttgagacctactgctcagaaaaaaaaagattcctttcaaaatattactgcttattggcaatacacctagtccccaagagctctaatgaacatgtacaagataaatattgttttcatgcctgctaaaacaacattcattctgcagcttgtggatcaaaaagtaattttgactttcaagtcttgttatttaagaaatacattttgtaaggctgttgctgccttagatagtgattcctctgatggacctgagtaaattaaattgaaaaccttctggaaaagatttaccattctagatgccattaagcacatttgtgatttatgggaggaggtcaaaataccaacattaacaggagtttggaagaagttgatttcggtcctcatggatgactttgagggagtcaagacttcactggctgcagatgcggtgaaaatagcaagggaacaagaattagaagtggaacctgaagatgtgactgaattgctgcaatctcatgattaaaactcgaatggacaatgaggtgcttctctacatatgagcaaaaaagtggtttattgagatggtatctattcctagtgaagatactgtgaaaattgttaaactcacagcaaaggatttagaatagttcataaaccataaacttaataaagcagcagggtttgagaggatttttaattttgaaagaacttctactgtgagtaaaatgctgtcaaacatcacatgctacagagaaatattttatgaaaggaagagtctattgatgcagcaaatttccttcttctcttattttaagaaattgccacagccaccccaacccttaacaaccaccaccctgtcagtcagcaaccatcaacatcaaggtttgctaccaacaaaaagattactactcactgaaagctgagatgattgttggcattttttagcaataaagtatttttaaattaaggtatatacattttttagacataatgctgttatacacttaatagactaaaatatagtgtagacatagcttctttatgcactgggaaaccaaaaaatgaatgtgactcactttattgtgatatttgcttcactgcggtggtctggaagtgaacccataatatccctgaggtatgcctgtattccaggccattgaactatttatattattcttcactgcaatttttttacattatgagattattttttagtgtttattctattatctacacaaagtataaagattgtaatagctatcttaatttgtattaatctgccataatatatatagtggctataatttttattaaattcagtttttcaggactagattttacatatctaaattctgttacgaattcttaatttttttgtggcaatttatagtcagcaaatgctatcatgtgtcattttagccagtgagttttatgtttgttattactaccaataataatcatcatggtttggatagaagacttaacagaattttttctttcttaagcaaatccaagagagaattttgagcattgccctccagctctgtagcagggtttaggcagcaaagatcttcagggtagaaatgtcctgctttggggtaggacagaaacagacttgataagcgcatgaacagatacattgcagagaatatggtagctgagtgggggagcagagtagagcatatttgggggatgcagtgaaggacaagactggaaaggtcctctgggaaccagaatttggcaggccttgggtgcagtcacatgaagatgattttattctttaggtaatatgatttgaaccccccacacacactttctcctgatcagcatacaaaatgtggaaaatatataaaattagaagaaaatgttacctatcagaggtaatcactgctaatatcttaaaatatagctttccagtgtcttccattttgtgttttacacagttgaaaccaaattacatacataattttttatgctgccttttgttttttgtttttttttgaaacagggtctcactctgtcatccaggctggagtgcagtagcacagtcatagctcactgcacccttgacctccctgggcttaggtgatcctcctgagtagctaggactacaggtgcacaccaccacacctgctaatattgtattttttttgtagagatggagtttcaccacattgtccaggctggtcttgaactcctgagctcaagcaatccacctaccttgatctcccaaagtgctgggataggaatgagccattgtgtccaaccctcctgctttttttttttttaactgaacattgtaatataagcatgtaccatgttactaaaaactttagtatatttatttcaataatactatgcatattctttaatggatggagtgtaaattaagtaacagttcttctgttttggttattactgttgtttcctacgtattccctttattgctaattctgtgctgttaaacatttgagtgtaagaagcaagtgaggtatatgacagtatgtggtaagtggctgaaagtttaagtctgaaaacagacataaactgttaggattgcagaatagttaggatcgcaaacctagattttaagataatccaccgggacaagataataaagccaacgatagtatgcaggacaaaacacaagggccagaggacagaaccttggtagaaaaagacctaattagggccaatgagaccaaacattggggaggtatgtggtatcacagaagctaactatggaaagtacgttagaggacagggtgttcagctctgccatagcgtagagagatggggtaatatgagagatgctctgtttatttggcaatcagcaagtcttcagggaattctgagagaaaagtttcaatggagttgtaggaacagaaaccaggtttcaagggattagagagcaagcaggtggtgaaggagcagaagtgtggagtgtaacttcttttggaagccctgttaatgaagaaaaggagaaaaatgcaattgggtaaaagagacaagaataaacagcaatattttatttatttttaggagaaggacttgaacatgattatacattgaggcaaaggattagtgtaaatgaaaatagggatacaaatattaaaaacaaactcatgattgagagtctgtatgctttcttaaaaaatatttttttttctgtcctaaaacctgattactagtttaagaagaaattcccagacttttcctaatcaaatgctatttccaagcattgtggcttaaaaactggcttacacccaagacttattttatcttactgaaatgaggaactacccatagtatcgattttggactttgcatgtttgctttgttttatttaagtgagtcatcgctagcatagcataagaataaacgcatttagtgacattttatttctagttaacattttctgtatttccttgttcgcagattacaaccacctttcaatggcagtttctgagaattctctagtgctggtgtctaaacatggttattaacattttatctgctatttttacctttttgaggccagttcaggttaccataaggttttgtattgttaaagtatcacgtctgtgtaccatcccaggcatctttatggttaacaaatgacttacaggaagtgtacctgaatatcttatgtggacagttctgtggacatcactatttcctttatgtatgaggcagaaatacatagaaatagctttagaaatagcctcaggaagtagttagaaaagattattcatagtccttccaaaaaaaggtaattggttgcaagattttgctttaaactaaattaataacctcttataagcaatcataaattacctttataatttctgttaatagaaaagtaaacaaaatcatcaaactaggaatacagataatatgcatttgtaattatacacaattgaaaactgtaacttccgtcattatgctaatcaagtgtaagccttcctgaagcaactaggaactcagtaataactgcaatattagctcttactgtttgctcattcaagaaactgaaaattattaccaactggtagtaagtcaaaatgaattcaagagctatttttgctaagataacttatataaaccctagctgccacatgactctctgctggtactgtattgccttcaaaggaacatcagtccggcattcaaaataattaagaagctattttaactgtttgttagagtttctctaacctaccctgctccctctggggtttccttctatgtgaggagtggtgtcagatgggtcaagtaacacaatataaggcataaacatgaaatctgtttacactgactgtaatcaatatcagcaggagataccacagcaggtctgtgccactcaaggaaggtcccagcatgtatgctcactacagtccttttatatacagccatctataatctcatccttttaccaatgcatatgatcccttccatctcctccccagaccttccttcaaagtagagctatattaatagtaggctgtgctgctgtgcctttgattataagttacttcatccgcataagtgctgaattattgtaatatcattagtgtaaggataagcaagacaaccagagcagagccttcatagtacagtttgtaataactctttgtgctgttttgtcataccctggccatgtcgttggctcatttctctcttgatctcaagaatgtaaacaccctaccatcttcttacctgtatttccaagtatgtcttggtgacccgaacatattcttttgaacttactgtttaatattcctgttccagaaaactgatacattttcctcctctgatattatagagttcctttttgataattatacttgtgaaaataccaacggaggaatactttcataatatgtagcagtatttttcacagtactggaggatggcaaaattaataataatacatagcaaaaatttcattaaactcctatttcccttactctcagtagctttcatttgcaaggcagctactccagacatgcatgcagaagactccaggagtttttaggaaccagagaatcattttacccaaggactcaggaaatgcatcataggaaaagcttttgagcaatgtcttgaattatataacacttggtggtttacgcagaggggtgtgtgtgtgtgtgtgtgtgtgtgtgtgtgtgtgtgtgtaatgccatttaatttagtaagtttttataagcattttagatccagacaacatatgtttaccaatttgtacctaactataaaacatttcataagaggaaatttatacagaggagaataattacaaattactttcaacatcccttcagtgttgaaattaaacttgagctcagatctgctgagtctaaaatttgttccctcctctttttaccatgtgggtgaggctggatactaggaaaggataagaagacatttgggagggcatcctaaaggatgggaaaaccacgaaggcagacatgcaggtgcatagtgccagggcagaaaatagtgaagaactgtaggggcgcaaatttgagaggttgaaggaagaagattgaatactagctgaagagtttggtttttcgtgtacatacataagaagccataaatttattgatctggaaactggctgattggagctgtaattgaagaaactgtttacaactattattttcccacacctttttagaatatttagaaagaataagtctttttgttcaaaagtaaagtctctttggaagaacaagtaacctactaatttggtttcttgccttttcttgatttgttatttaaatttcctacacaacaccaatgtacattttcctgtttcttaagatctaacttgtaattcatttttcatttcttcaagtgttttattcagaaagggtacctgggtgatagttttttgcctaagagttatctttctttctccttcctacacaatgcttagtttgggctggtgtagaatccatagttcatatcaacttctgggttttgtgaagttatttattccctgtgtccttgtttttaagagttgtggagaacatattttcatttctatgtgcataatctgattttgaatagactgttttttagagcagttttagcatcacagagaaattgagtggaaggtacagaaatgcctcctatacctcctgtccccacatacacacaatatcccccagctattaatattcctaaccagagtggcgcatttgttacagttgatgaaccttccttgacgcagcatcatctaaagtactttaaagtttacgttaggcttcacacttggtgttgtccattctgtgttttgacaaatgtataatgacatgtacccaccatcatagcatcatacagagaagtttcactgccctaaaaatcctctgtgctccacttgttcatccctcctactcccaacccctggcaatcactgattcttttctatctgcacagttttgccttttccagtatgtcatagttcataagctaattttaatttcctatatccttgcaggatttttaccttatccgtaggaaaattttgtgtagctttcatcagatttcccagtctatgatgtgtattctgaaattttcggtatgaagtctttccttcaattaatctaggaatgtttttttctcctgttacttcatttttattgtgtcctctgcatctatattgttctagaaagtggagaggtgatgctatgtagaatttgcatagttagagcaaaataaattttgtgagtttgagttttttaggttccacatataagtgagattatgtgatatttgtctttctgtgccggggttatttcacttagcataatatcctcctggttcatctatgttgtcacaaatggcaggatttccttcttttttaaggctgaataatattccatttatgtatatacatcccacattttctttatccattcatctgttgatggacatttacgttgtttccatattttgtctcttgtgattaatgatgaaatgaacatgggggtgcagatatctcttcaaaaaactaatttaatttcctttggatatatacccagatgtggaattgctgggttatatcatggtgctattttttattttttgaggaatatccatactgttttccaaactgtaccaattggcattctcaccagcggtgtgaaagggttcccttttctgcatatcctcaccaacactttgtcttttgtcttttcgataatatccattgtaattgataggagtgttaactcattgcggttttgatttgcatttctctgatgattaatgatgttgagcatcttttcacatacttcttggccatttgtatgtcttctttttttattgtaaattgacaatttgtaattgtataagtttatggtataaaaagagatgtcataatttatgaatacaatgtgggataaactagttaatgtattcatcacctcagatacttgatgttttttgtggtaacatttgaaatttactctcttagtgtttgtcttcttttgagaaatctctatttgagtccttagcctattttttaatcaggttatttgactttttttttttttttgctattgagttgtatgagtttcttatatatttgggatattaaccccttatcagctatatggtttgtaaggtttgtaaatattttctcccctctgtaggggacatacgtttttttaatgaaatttttcatcaagacatctgtcagtcactgaataaaaaccctgcatgaagctataagactttttgtaatatagaagattataaacaagtattcagcaaatattcatttgaggtcctactgtgtgccaatcagtgctatgtttttatatgaaatttctcattagaacagttctagacaatgaacagttgtctactgacaaagttccttgcattagagctcactcttttctttttatctcctcatgatggaagaggagcctcttctcctgttcagggccagtccccctaattatcacctggatcccatcgtctggcattctcagggatgaacctcctctggcaccattattcataccctctcaaatcttttctccttactgttagtgctgacaggttctttactatcagcactaaaccatgcttaagtctcttcttacatgttaaaatgaaatcctcactttatgcatatccccatttggctgccaccctaattttctccactttattactaaaatatttgaaatgtctgtgttccctgtctctgctcctcatagtaatccggcttccatccctccttttactgaaactacacttgctagtgttattagtgaattcttcattgctaaattttttttagcctttatcttacctgacctctctgccacatttgataattcaacaattctttctttaaaggttttccccttggctttggtgacaacgtaatctcctttgcttctcccactgttgacgtgttagcctcctttgcctgtgccccttcttctcgtataccctaagtgttcatgttccttggagttccaaactctgccctcttccctttctcctctacccactctccctgaatggccttatccattcccatagcttcagtgactatttacatgctgaggtcttttgtcctttttttttttttttttttttttttgagacaagatctcagtttgtcacccagtctggagtacagtggtgcagtcatggctcactgcagcctcaaactcccaggcttaagcagtcctcccacctcagcctcccaagtagctaggattataggtttgagccatcatgtgcagcctgtcatttacatttgtattttcagccctgaccacctttgagttctaggtctgtgtatctgtctgcctcctagacatttccaaatagggaacccacaggctcctcaacctcaaaatatccaaaactggattatcatttccctcactccctaatcccactagcaaaatgagtgagtgaataaataagaaataaataaaacaaaatcttcttgtgtccaattcttttcacccatttacccaagccaaaaatatctctgatgtatgagatgttcatttatccttagtgttgtgtcacaattttgtagatctgacttatccttggagtattaaaatacttatttttgcctctgttcccacaggtttcttttttctcaagagtctgtatcttttaagaagtagaaatcttcattaatattgaaaaaaatctttccttataaatttgaccattatttcactctggtgggcaaattgaggtggactatatacatccttgataataacttgtaacatttattattgagatacactgtaagccaggcactgttctgaactcttgtgtgtaataattcatttggtttccccaaattcccatgagttgtaggtattgttacatcctgtttcacagaggaggaaatgcagaatgcagagaggttaggaacgtgtccagcgtgacagttggcagggagcagaggcaggatttgaacacaagcagcctggctctggatcctttaagctcttaacctctatgcaatactatctggcaaacagtttgcattcttcatagcagtttcttatcactgttttttaaaaagttaaaaatatactgaattaccaagacatggcataattttaaatgtgtacctagggtatacctatgcaagttattcgagaataagtaatgcattttgctggtacagtagtcacaaaaaaatggatccataattttccttttattttacttttattttttaaagactttctagattttctttgactcgtttgaaacacaaggccatagcaacatttcttctgagtcctctgcttattttatgtcagcagctgtatcactttatcttagaaatacttgggttttcacagtatcaacacaaatcatattctgttgctttgtttctggaaagtggttaagcaactgtataaaagtcataggaaattaatgactcacataacggaaaccatttactaatgtgacttttgtctcagatgccaagtagtctgagtttgtttccatggtaacccatcagtataacaaatggtcgcaaactaactttgctacttttttggttgtttgtttcatttggacagctttctgatagctgtgtgtgtgcgtgtgtgtacacattaaagattatcacacacaaaaaaaatctgagtaattgccttagttgcacaaacaaaacctttttttagagagattgtttgagaatccaaggctattttgatgttacaaaacgataaagattacttaacatatctttctacttcagttcctattaagaaagggcacacagtcatcaatttttaagcccatacatttaaaaaattcatttataatatttgtttatttgaaatgtatcaatcataggagactctgccagaaacaaggcagagagaacgggaaatgaggacactgtcttgggagactgaagactgagtgaatgatggaagaagtggaggcagccagctctttcctgcccctccctgggggacagtgctctagggtagggaaaagaggacactgagaagggaaccaaggcaggcctggtcatatgggacaccgagttgcagagagatttctagaggaggtaatgacaaaactagatgcgttagaattaaactggtgagtgcgggaagttgaaaggagagtggatggaatagaagggaaagaaaaaatcatgaacaaaggcatgcaaatgagaaatagtgtgaagtaaatgggaatgacaaacaatataagacagaaagaaagggtcaagagataagactaaagacagacaggggcttaatcataaagaggccccattaaggaggttgaacctaatcctataagaggaagcagtgaaggattttaaacagaaatgacattatcaagtttgtattttaaaaagagttctctggtagcaatgaggaagatagatctgagcggggaccattaaggaggctgttgccatgcttcagggaagagatattgagagtctgaattgtggtggtgctagacacaggaaagggcttgatttacaaataggaagtaacacaggcaagaattggtagctggaaccagtcatttgtggcccatgcctgacttcagttattcatttggtcaacaaatctttattgtttcctgtgtttggcaaatgattagtgttatgctgtactctttcccaccttcatcatttctggatttcttctccattaaggattctttgtttgcacatcatgaggtaattaatagacaactgcacttcgcatggctctagttcatcccaacctgatctcttgtcttggcttatttgactttcttactcacataagaacctgtttcagagtcctagcacatttgtcagtctactacttgggaggcagtatctatgtgttcggataggggcttattgcccaggaagtgaatcagagcttatttgtgtcttcattgggtgggactctacgggtcatgaaaaatatgtacaataggttccagtgtatttcgtctgtatacttaaatgaggggaacaggactctgggatggaccacctacaacaatgtgaataacatttgaactttgcagatttggaaatggtaagacttagtctatgtcagttaggatttagttcagctgcatataacaaaatccaaaataagcattttaaataataagatttaagaagtttgggctgggtgtggtgacttggccaggcatggtggctctcgcctgtaatctcagcactttgagaggccagggtgggcgggtcacttgagtttaggagtttgagatgagcctggccaacttggtgaaaccccatctctacaaaaaatacaaaaattagctaggcatggtggcacacacctgtagtcctagctactcgggaggctgagacagaaaaattgcttgaacctgagaggtggagtttgcagtgagctgagatcacaccactgcactcagcctgcatgacagagtgagactctgtctccaaaaaaataaaaaataaatacataaataaaaggagtttggagggagaaagtccagggctacatgtttcttagagacccaccttccttctggctctgcaccatcatcacatggcttttcctgagggtaacctcgaggtccaaaatgactgatgagaatctaatcatcatcatgacagttttccaggcagaggaaagaataaaaggtaaaagggtatgtttcaactgtccctctcttactctgcctttccaaaagttatacccaataacctccatttatatctcattagcttatactccatcccatgcctaccctgtaagctgcaagggaggtcaggaaaatgcagtcttttaactggacatattgccagtttgagtaaaatcagggttctccttttaaggaagaagagagactgcatattggataagtaactgacagtttttgccacatacgctcctgggcaaaccatttgactagtcaagctggtaggttacttactagcctgctaggaagtaccatgataaacagatgtcagagacctaaagccttatctagaggctaggactactaggtgggttcaccagttaacatgttgatatatgaatctgaggactaaagaagaagacttagttttgtttgtttgttttgttttgttttgtttgttttttgagataaagcctcgctctgttgcccaggctagtgtgcagtggcgcaatctcagctcactacagcctcaacctcctgggctcaagcaatcctcccacctcagctgcccgagaagctgggaccacaggcgtacaccaccatgctcaactaatttttatattttttttgtagagatgaggtttcaccatgttgcccaggctggtcccgaactcctgagctcaagcaatccgcttgccttggtctccgaaagtgctgggattacaagcattgagccaccgtgcccagcctgaggacttagatttttaagttctcagtacatgcataatagttaagtccatcagagtaaaaaaaatgagaaagccgccaaggacagaagcttggtggacatcaacattttaaggagacaggagcaagaaactgcaaagaaatagtcacataaataccaaggacaagaatattgtaagaatgtataagaagggtcaagtatgatactaaaaaattacccttggatttgacaattagttacttactcatgagcagtttcagtggaattgtgcggggtagaagcctgattaagagggactgaaaagtaactgggaggtgaggagatggaaaatgtctatactgtagagacagttcttcaaatttcagttccaacctttcctgctgagtgacctttgacaagtcacataatttctgtgtatcttagttcctttatctataaaatggagttagtagtaccctccccatatagttgctttgaggatttagtagttaatatgtgtaatttttaatatgtgtatttataacaatgcctgtaataataatcactcaataagtgctgtcatcattatccttagtatcatcatcttcagggagcttggacctgaaggcagagtgatagtaagtaggtgaggacatggaattgtgggaagtgtattttttcccgtaagattaaaagacatgtcctgtatgaaaaccagttctctatctctattttacactgtaattccaattacctgtccatatttataatgctgtgctgaagtttcttaatctcttgtttttttccccaagcccatcaaacttaatgttggcttcctccactctctaactaaactagattaatatttctgctaatatttctttcctgcttgtctggtttgtttcttaaaaaaaaattcacatacagagttcacttgatttctttggtttttattactcaggcgaaagctgccctccatttgtgcaaataataacatatacgattaggcatgtaaaagctactacattataagggcatttaaagtatttatatattagtattgccaaggaattccacttatttcacaaacaaatgaaatgtgacagtcatgctgctgtacttcagcctgggcagcaaagcaagaccccatctcaaaagaaaggaattaagggaaggagggatggagagagggagggaaagaataaagagaaggaagaagggagggagggagggaaagaatgaaggaaggaaggaaggaaaatgtagtggcttttacagagggagagagggaaggagggagggaaggaaggaaggagcgagcttttacagagggagagaggaggaaaggagggagggagggaaggaggaaggatggaaggaagggaggggggaaatgtagcaagttttacatgcctaattgtatggagaaagggagggagggaggaaaaaaatgtagcttttacggagggagagagggagagagggaggaaagggagggtgggagggagatgtagtagcttttacatgccaagggaaggaagggagggagggaggaagatgtaatagcttttacatgctggaaggagggagggagggaaatgtagtagcttttacatgccaagggaaggaagggagggagagagggagatgtaatagcttttacatgctggagggagagaggaagggagggaaatgtagtagcttttacatgcctaatcgtatatgttatcatttgcacaaatggagggcagctttggcctgagtaataaaaaccaaagaaatcaagtgaactctgtatgtgaatgtttcttttaagaaacaaaccagacaagcaggaaagacgtatttgcagaaatattaatctagtttagttagagagtggaggaagccaacattaagtttgatgggcttggggaaaaaacaagagattaagaaacttcagcacagcattataaatacagacaggtaattggaattacagtgtaaaatagagatagtgaacaggaagtaagggaggcagggattaggactttgctttttaagataccatccaattttcatgttagacaataaagaaaattcttagtgggttttttttttttagcaattaggaaaaaaaggcatctaaagttatatacttctgttcccatttttagattattcagtacttgacaatgtttttgaatttgtttttattttaacaaagtcataaatactaataatttagagtctaagttccacaaggcatattatggaaaagcacagtccccaacaaccgacctgtttctcacatggcccaacagggaaggagccaggagaataaatgcatcagcttccctcccttcctgccctctatccttgcaatgtttgtcactttagcacaatcggaggtagagggcaagggagcttggttgatgtaattcataagactggcgtcctggaccacagagaagggtagagtgaatctggaatgataaaatatcaagcccactagtttggatttccatgagcactttaattccctgtatgctttttttaaaaatatagcatcctattcctgtatggtagatgcagtttcttttttatatcactcagaaatttttttattcttcaagcacaggctctgttttgttcaagttgctatttttctgtttttttgtttttttttttaagactgtatcttgctctgtcacccagactggagtgcagtggcacactcatggctcactacagccttgaactgttggactcaagtgattctcctgcctcaaccttttgagtagctgggactacaggtgcacgccaccataagttgtaaattttttgttgaaacagggtctcctttgttgcccaggctggtctcaaactcctggctcaagggacccttccaccagcctctcaaagtgctgggaatacaggcatgagcccctgcaaccagccaagttagtttttttctattcatcttggtttctttcatattaagagactttcctcacttatctgcccatatttaactatgaagcactaaaagttgattaggagctctgtgtatgtggcaggtgcttgtcatctcagatttttattgtaggctgatttggctggctgtgtcattgggaaccctcaacatctgtctcatgaaatcttttctttgaggctggttggattccccagagaatattcttcccacattttgaagaacaggtgcctggttctggcattgtgagaagccaggttaggggaagaaggttggaagtctcagcattaagtcatctttcattaccccagccagcatgcttttgtgctctttgtgctctttctgatacctgccctcacttcaggctgtccagagatccttctgtttcatcttatcaggagaatacatctcagtcatctgcaggagtcagggaaggagaggtctgcagtctgactatttccaaaacagtttttgatcaatcctctgctgtgtccctccttcattcgacttcaaaacctgtttaagtttccttctcttggcttttactattgccagcatgaggttcaaatttcctcagtatgctaaactagttatcacttgtctgtctgtctctggccacttatttttgtctctagttctctttgtccctgtgagataatgcctttgcttgtttttatttagtaggtttggggagggagcagaggctaatacatgcactcaacctgccatgtttaactataaatttgtatataattttgtaagaaaagtaaaagagttttattgtaaatgttatttcttgatatctgatcatatatcagtggtctcagtgacagcaacaaccaagcgccttgatgctcagtggaccctgaagggtccaggacatcagtgtttatatctccttgttgggagctccggacaccatagctgatgcctccagcaagccttgaggccaagagatgttgggagagaagcaataataaaaaattctaggccggacaccgtggctcacatgtgtaatagcaacagtttgggagatcgaggtggccagattgcttgaggccaggagtttgagaccagcctggccaacatggtgaaaccccgtctctacaaaaatacaaaaattagccaggcatggtggtgcacacctgtaatcccagctactgttcagtaggctgaggcatgggaattgcttgagcccaggaggcggaggttgcagtgagccaagattgcaccagtgcactccagcctgggcgacagagcaagaccctgtatccaaaaaaaaaaaaaaaaaaaaaaaatctggattttttttttcttgcttatttttattactattcacagttttttaaatgtatttatttttgagtgtacaggttagcaactgccctccttaccagggagtcctccagctgcctgacaagtacctccaggtccatcctttgtcaaataacacttatctcgcctgcattgtgaccataccaataaattacaccctgcctggatttcaagggagactccactgtgaacccacacatacattcttcatatcatgattcattaaatcacttaagggttcctaaggaaaaaaaatggccaaagttatcatagtagaactggtggtagaatgcatgccctcctctcccatttgtgtgtctgtttagaacataaaagtaaacaaaagtgcacatatgacacacaaatacatacttgatttttaaattatgtttgctttttttttataattcctgttcttggatttctgtgtactgatggagaaatcagaaaaaccaggccaggtggcttacacctgtaatcctagcactttgggaggctgagacaagagtatcgtaatcctgacactttgggagactgagacaggagtatcacttgagcccaggagtttcagaccagcctggataacatagagagacccatctttaccaaaaatacaaaacttggttgagtgtggtagtgtatgcctatggtcctagctacttgggaggctgaggtgggaagatctctttggcctgagaggtcaaggctgcagtgagttgtgactgcaccactgcactccagcctgggtgacagagtgagagcctgtctcaaaaacaacaacaacaaaaaaaaaacaactgatagatcgtaataaaaatctattttattccctgaggcagctataagtttgactgcctgtcacattcaccacagcagttttcctgtctctaagcctttatctaaattttcaactcacctaccagtcctatcactccgtagatatgacttattactcccctaagaaaatcaaaactgttcaacctgggctctcttgccgttctcttttgctttctctagttttctctttatttcatctgttatctttgtctctttcctatgttagaggaatggttatctttttctaaggctgagcacccccccaccccaatacctacatacgacagcagagagaacagtatgtacaaaggcctgggagcttgaaagagcaaagttgtggaaaaatacagattctcctttgtggacaagtgggctttagatttaaacaggcctagtttgaatgccagttcttctctaccacctcctacttaaatgaccttgagttcacttctctcatcacacttcattttccttatctttaaagtgacgaggctcacgcctatgatctcagcactttgggaggccgaggcaggtggattacctgaggtcaggagttcaagaccagcctggacaacatagccaaaccctgtctcttaaaaacacaaaaaaattagcctggcgtggtggcaggtgcctgtaatcccagctactcaagaggctgagtgaggcaggagaattgcttgaatccaggaggcggaggttgcagtgagcggagatcacaccactgcactccagcctgggtgacagaggaagactccgtctcaaaataagtaaagtgaagaaaatgccagctacttcacaaggttgttgggagatttcatagcatatggtaagctctcaataaatggtagctgttcttgctgttatggctggagtaaaactatgacagtagttcatcttaaaataagaatttgcttattcctagaataagcatttgttcatatttatgcctcttgcattaactatgaatataatccctacaaggtcaggaactctgtcctcgtctttatgttttaaacatgtaccacatgcgcagcatataaagtaaatgtacattatgtgttgaatgaatgaatggtgtagcctaatgtatattttgattgaattgataagtaaattcactttttttccagtttccagtggataattaaaaccttccaaagattttcagatcacattgttaggaatttgcttccttcctgctacactgtttacaaatactggcttttaacacattacttttgcatgttagacttgagtgaaagtatgggtgtgctttttaacatgtcatcaataatagttaattaattggctctttttttctttccttcagggaggtggtacaagcaaactgtgttcgctggagaaagaagttctcatttatgtgcaaaatgagtgcaagtgctgccacaggcatcctagatccttgtatctacagagtatccgtgaggaaggtataaaaatagcctattacttcttccctttcagaaaccataattagttccgtagtcactggctggctttgtttatctctgctttatctgtttcattagaactgtatatgcagtttcacttcatgctcgctgcagtaattaaaataccatggcaaatatgatgaagaatctgaggttataaattaaaattattattcaagaaccttcatctcactgtcactatacgtataagtattaatcttacttgtgttagtttggggactgtatatatctatatccactatttgttaaattcctagtttttattaggcattgttctgggaactttatgtgtaatatatctaataaccctgaaattaggtgttattttctccattttcaggaaaaccagggctcagagaagttacttgcccaaatttacatagttaataaatggcaaagtcgggactcaaacagagttttctgactccaagtctgttttctttcctgtatattttctttcccagtattaggttgaagcaaattaccaataatctaaaaaaaaaatggtaatttcatatggttcaactttctgtttgtgtgtgtgtgtatgtgtttgtgcgtgtgtgtgtgtatgcatgtgttttacttaccaaaataatacatataatggtcaaaaattaaatagagaagaaggatttagaatgaaagcaagagtctctggccttgctcttttccacgccagttctgcgtccttgtcagtcagaataccattgccatggtattttaagtattacataaaatacttaatataatatactaaataatattttaagtattatataaaagaagccataaaagaaaaattagtaaactcaactatataaacattttatgcattacaaaatataacataaagtcttaaattaggggaaaatagtcacaaattgtgacaaaggactactttccttagtatagaaagagcactttcaaataaattaattttaaaaataaacaaccatttagaaaaataggcaaggggcagaataaacacttggcaaaaaaactataaatagcttttaaacataaaaatgtgctcaatctgacacaaaactacaaataagataccattttttacctataaagttgacaaaaatgaaaaagtttgatagtgtgctctgttgcctaggacacagggaagcaatcagtgaccagccagcagtactattccaggcactgggaggacagtggtgaactggaatgagttcctgcccccagggactttactttctggatggagttgggggaggtgtgatagggaagacagagaccatagtaaacatgtagccaaataagattatttgaggtcatgataagttttatgtgtaggaaacaattcagtaatggagaatagcttgggcaaaggagattattttagagaactgaggcaggagtcagtgaagacttctctgaaaggtaacatttgaagaaggggcaaccatgtaaaggtctagggaaaggccattctaaaagagtaggacctgaaagcaaaaaagcccctgtactagtttcctaggactgctataaataaatagcacactctgggtggctttaaacaacagaaacttactgtctgagttatggatgacagaagttcaaagtcaaggtgtcagcagggccatgctccctctggaagtgctgggggagaaactctcacacctctcgcctaatgtccagcagcctcaggcattccttgacttgtggatacattattccattcacgtgattgttttctccctttgtgtcttcacataattttccctctttgcatgtctgtttctctgtcaaaatttcctgtttttataagaataccagtcatatcagattaggacctcattttaacttgtgtacctatatgaagaccctatttctggccaggtgtggtggctcacacctgtaatcctagaagtttgggaggctgaggcaggcagattgcttgagcccaggattttaagaccagcctgggtcacatggagaaaccccatctccataaaaaatacaaaaattagccaggtatggtggcactcacttgtagtccctgctacttgtgaggcagatgttagaggaccacctgagcccagaaggctgcagtgagccatgatcatgccactgtactccagcctggatgacagagccataccctgtctcaaaaaaaaaaagaagaccttacttccaaataaggtaacattctgaggtaaggacttcatgtctttttttggatgagggagacgggggacataattcaacccataacaggccctaaagtataataaacatggagattattttaatacttctgatattaatggactagcttgttgcagaccactgctccctctgagaactattagaaaagctagacataatatccaaaacagccgcttgaaggcattggaagctagtgaggtagtaaggacttgagaggcttagaatccatagaggagggaagcatagagataagcctgacatttggcattgcttttaccctcaaagcatttgctgatttgcaagtagtggcaaagaaactgagcacaaaagaatggctgagcagcgaagacactgagttgagattgcagcaatcttaacaggtctaaaggaacaaaaactgaaatctggggacaaccaaagaggaggggccttgataaacacctcaggctttcagttgggactcactctctgagagtttcaacctagtaggaagagtgtaatacacacagatcagccttacaaagacaaacccagcctccagtccgctcaatcccttcttggatgaaggtgatctgcctcttccttactacttgccaaaagcaaatgtatgccttctcctatatcacatcactctgaacctcaaattatttcttcaagttttcatacccagttatcaagcatacgaagagacatgactacatgaccaaaaatcaaaaggaaaaatatgataagaagagacccatggaagatacagattttggaaagatcaaagacaaacttttacaataactataattagtgaacaagatggagaatttcatcagagaactaaaattgttttttaaaaaagcagcaaattaaattctaaaactgaaaagtacattaactaaaatttaaagctaagtaaatgaataaaacttcaacagatggatttaacagcaggtttaccataactgaagagagcattggtaaattggaaaatagaagaaaatattcaggctaaatcacagagagaacaagggtggaatacacaagaaagaaggtaagacatgtaggagacagtagaaaggtctaattgtataagccctaggaggagagacaagtgagtgtggctgagaatcttctaaaaccaatcaaagatatcgaaccacagattcagaagtactgtgaaccctatgcagtgtaaacagcaagtctggcatgtttaaatgacaagaccagcctggctgtggcgtgggaaacagagaggcaaagttcttggtagtgggattggacgcagtagatcaggccgggccttatgaagagtttagatctaattataattgtaagtattggaggattttaataaggagagacatcatcttctgtaagatcacttttgctgctgtgttagatgaatcacagagaccacttaggtggtttgtgttagttgaagggagaagtgcttatgttttgaatagagttaaaacatataagtggtcattattgtgcagccagttatccaactaaaaatagaggattctgttactatggagtgggggatatggatgattgggatatgactagcattctttctacagagattgaatgaaggaatagatccagcaaacgagagtgaggagttgccagtgaagtaggaataaaaccaggcaattgtggtgccatggaagtttagcgaagaaaatgatgcaacaaaggaggtggagtggccaagtgtgtcacctactactgagatgttgaataagatgaagatcgggagcctttggctttaacaaaatgaagatcattggtaatctgaagagctattataaagggccgagtacagtggttcacacctgtaatcccagcaatttgggaggccgaggaatgaggactgcttaaggccggaagtttgagacaaaactaggcaacatggcaagaccccacctctccaaaaaaaaaaaaaaaagagaaaaaaaaaattagctgggtgtggtggcacgcacctgtagtcttagctactcagaaggctgagtgggaggatctcctgagcccaggagtttgaggtttcagtgagctgtggtcatcccactgcactccggcctggttgatagagagagaccctgtctctaagaaataaaataaataaaaaatgaaaaagaactattgcagagggaaaataaggatgaaaccccaattggagtgggttgaagagagagtaggatatagcaaatatagataaatattttgatgagtttggctatagaggggagcaaagaaaagaattagctagcagaaacaaggatcatctggagaaaattttgttttcttatggaagggcactattaaggaatataacagtgacctaatgaaaatgtgatcactcataatggggtagatgtagtgggatggccacacctgaaatcactgaagcagggaaggggaggaacagcaaatattcatgaatgataatagagtttatcatagattgttccttaacatatttgtattcactgcttgaaagatggaaatgatagataatgcattatgtatctgatttatgcaagaaagataagagacaacaccatccagcagatgcatttttaaaagtaggtagggagtggggagtttggccctaataataatgacaaagacatatatacaaacacataccatgtgctaggtattgttctgagtgttttacacttaattctcacagctgtgtgaaaacaaatctaaagatttggcaaatttatgtacagtgacatattttaagttaaaaaaagacatcatctattattttttattattttccactttggccagccttttcacattaggtaagagggtttgtactatactaaatgtatacttttacatgcacagagtatctcttcaatgattcataaaaactggttgtccctggggtgtggtttcaagtcctgttgaaatctttctatattatattagtatgcttaactgagtaaataatttaacctttctttggtgattcaggtttttgcagtgagtccacaacactttttgaccatttcttcttcagcaaatagataaaatattagcttatattctcaccatttgtctcatttagattaaagttaaatgctaaataaaaattctggtcatttggggggcttgtgggagtctaaatagttggatttaagatcgtcagaattttactgtctatgatatttgccagcatatatatgtctgcttcagaattatttgacatatatttaattttaaatctttcattatgtgatatccttatagtattttctgtctttggcaggaattaaaaggtggaaaagcttatgcaaaggtaagcagatgttcttttaactgttttggaacatgtaatgttgcttattgctatttataggcttaaaaattaaattgtttactcttctaatatctgttcaagcttggctctttttgtatgcaacttggagattgaacagttggatctaacagtaaattataggcatattctttctaaatgctgattatggaatattattctttagattcagcctccctgctagaggatgatctctagtttgcattaagccatagcatgtgataattcaaaggatctcacctgggaagtgttgccaggcccacctcccccaactgtaagaggacctgtcctttatgctgtcttagcactctgtgtatacatgatcagtactgctggtttttacttttactagctatgtggaattactagagaatgtgctcacctttttgctgactagaaggaattagtaacaacattaccagaaattcacatagtccttttgtatttccagtctctgtgaatggtacctccatcaatccagtcacctgaactgagagattgtacactagtcttttttttcccctaattttttaaattttgttttttatttttgtagagatggggtcttgctatgttacccaggctagtcttgaactcctggcctcaagtgatcctcctgccttggcctcccaaagtgctgagattacaggcgttaaccaccatgcctagcccctgtacactagttttaacttccatatctaccaaacaccctaaatctagttggttgcaatgccaggatgttctttgttaaagtaatagaaaaccttcctcaactagagatttttcctatgttacaaaacaaggagatgtgagatagacttgcttcaaaactggtcaatccactgactgaagaacgtcatcaagaactcattatttttctctttccattctgccattctctatgtgatgactttgttcttggccagctcccctcctggacaccaggtggctggctgcttaattttaagtcaacacattcacgtatgacaaaaatccagctgcttctccctgtattacttttttttgagtgaggaaatgtttcctagatggccctcggagggttttcccatacctttcattggctggaactagattatatgcccaccgtaaactagttgtgggcaataggaatggattgccatggttagcttaaactaatcacaatctaacaatgagctagggtttgggtttccttccttgtacacatgggtgaactgaggctggacgcctgaataaaaccagggttttgtggctgggcgtggtggctcatgcctgtaatcccagcactttgggaggctgtggtgggaggatcacttgagcccaggcattcatgaccatcctggacaagatggtgagaccctgtctcagtaaataaataaataaaataaatcaaggctttgctatcaaggaatagcagggcattgattctgggctaggcaaacaacaaggtctgctgtagttgaccagtcctcttgatttttcccctctaaaaaggtcttgaaaccatactttctctccattcccagggccactgcctcaggttatgccttcattattttttatttacagcctgcactggccttctagagtctgtctctgttatctccctccatcctccatattattgccaaaataatctttctaaaattaaaacatgatcatatcgttcccccatttttagtcctttagcagctattcattgcttataaaggaaaatgaaaatttcttaatttacgtgtgtctggcatgtaagacacatcttgtcatctctactgtcatctgcacatgaacacacaagtaaacactcatacattcatccttatgcctcacacataccaccctcacaaacctggagtatcccatgctatcttagccttttgatttgtaacttgatgtttttcctgccatgcttatatttctccctcctcttgtcctgtcaactcatgtatcgttaaagactcagcttagtcatccctccccactgagaacttttcttttcctctctttcttgtaactgtgtcttcctctatcacagcactttcacactgcattaaagaatctgttcacttttctatcctcccctattaaactataagagtaggaatgacttccatattacctgaaatgtggatgctgaagattatttcatgaatgaattaatatctgggacaaatacagctagtgtttatgtatatatgccatttcatgagacagttactcagtgaagccaaagaaaaaatcataaggaaacatagactttctggttcttcactagaatgtaagctctttcaaggcggagtaggtgtcctgttcatcactgtttcccagtgtctgcaactgagcctgtcatataaaagatgcttgataatattgacttcactcattagtaacttttagcctgaaatatcacattgacatgccccaccttttaatatactttttaataggggctgtcttagttagtttgggatgctatagcagattaccatagattaggtgatttaaacaacgtttatttcctgcagttctggaggctgggaagtccaagatcaaggtgctggtggatccagtctggtgagggcctgctttctgctttgcagatgtctgtcatctcatggtgtcctcaaatggcagagagcagagaaaaaggaagcaagctctcttttgtctttttaaaagggcattaatccattcttgaggactccactctcatgacctaattacctcttataggctctgccacctaataccacccttttgggggttagggtttcaacatatgaattttggggggacataaacatgcaggcataagaggcactgatcagattctccccctttttaacttattgacattgtaatataccaacattacaatagtagatggtaagccaatgggctattgttttattcaacaaatatgtattaagtgccaggcactgttcttggtactattctaagtactggagatacagcagtgaacaaaacagacaaatcccctgcatttgtggagcttacatgctaatggaagcaggggtcgttggaggaacagacaatatgcaaatatgaaatatgtgtgtacatgatgtgatagtaactactaaggagaaaaatagagggggtaaggggtggaaggcggtaactacaaggtaaggcagggaagagggatgtgatataggatggtcagggaaggcccctttagagagatgacttttaaacattgacctgaatggagtaaaagagaaagttataagaaaatccgagagacagcatttcccgcaaaagaacagtaagtgctaaaggccttgaagtgatcttggcattttcaagaaagaggacattgtggctgccagagtaaatgcggaggaggaggaaatgaagttggccaggtagccaggcacagaggaataggagaccgcagagaaaactcttccaagaggaacgagatcatgaccttttcagggacatggatggatctggaatccattatcctcagcaaacttatgcaggaacagaaaaccaaacgctgcatgttctcacttataagtgcaagctgagcaaatgttgatcacgtggacacagggaggggatcagcacacactggggcctgtcgggagggggcgggaggagcaagagcatcaggaaaaatagctgttgcatgctgggcttaatacctaggcgatgggttgataggtgcagtaaatcaccatagcaaactatgtgacaaacctgcacgtcctgcacatgtaccccagaacttaaaataaaatcaaaatttaaaaaactcttacaggaaatcttgctgtaaagagggccagagaaatggttcaatagcctggagagagacaaagggtgaggttttgttttgttttcttttgttcattaaagtaggagaaaatccagcatgtttgtgtgcttttggaaacgatccagcagagaagggaaattttagaatgcacaagagcagaaagcataactgaagtgattaacttgagtgggtgagaggagagtggttggcctcagacagtgctgtaagtgggaaagcaagcatgtgggcacagatgcaggtaggtgagtggatgtcactggcagtaaaagcttatggaagttaagtgctcttttgattgctttaattttccgattgaaataggaagtaaggtcatcagcagagagtgaggatgagaaagcgatgttggagggtcaacgaaaaggataatgtatgaatcataatagggtgcactgataatgtgtgatcattcatgtaagtattcacatgcccagttggatatggctttgtcctggacatatccaagctttttctgctgatcttttgcccctctaagagaggcaataagacagctgggcgcggtggctcacacctgtaatcccagcaatttgggagactaaggcaggcggatcacgaggtcaggagatcgagaccatcctggccaacacggtgaaatcccatctctactaaaaatacaaaacaaaaattagccaggcgtggtggtgggcgcctgtagtcccagctacttgggaggctgaggcaggagaatggcgtgaagctgggaggcagagcttgcagtgagccagagcttgcagtgagccaagatcgtgccactgcactccagcctgggtgacagagcgagactccatctcaaaaaaaaagagaggcaataagactagagtaaccatgtgcaaattaggtgggtattactgctgcctgatgtgtgtctgacttattgcatttggggcttgtggcccttcagctgctctctgggttcttattcttacattctttttgtaccaattaaaagctattaaaataatgctccagcctgcaattaaaatattcatcttgaatgccatttatatgtgcccactgtgtgttttaaaaccctaaggcaaacaacttagaatcacagcagtttttgaaatgtataatactttttattgtatatttatggaaatatgcttaataagttgcaactcaattcattttttgttaataaaaagactgtatatagacttagcttgctcaaaaaatgatacaatgaggttgatttgttgtaccacatggaaatgagaaacagggttgagcaacaacagaggaaagactatagggcaacctttggcagctgcagaaaatggggactgaacctgagcagtaataacaagaaggaacaggtttgagctgaacatctgacagcagcagagagggttgatgtggggcagagttctgagaaagggaggaattaggtttcataaagagagatttagttcaaggatgatcagcaaggcaaatgtggaaggtagtgaaagagaaggcactggtaccaaagaaaataggtgattcacttaagtcactccagttcttgcatgggaagtgaaaacttaataacctgcaactatctgccttcaccagtggttaacttggcatagaactggacccagaatagggagagaagggtctaatcattcttctctatgtgtatgcaaattatcactcttggtttgctagtatttcccacagggtggtgtaaataccactatttgcaatgattttagctgtttgatacacattatttttactttaacagtaatatatattctttaatgtatatagaaaaaatatatttaccacatcaaatctgagttcaaagatcctgttgctgaacgcaagaatagaataaataaattcatataaaaggtgaaccaatttaaaaacacaaagcaaataatagaacaggtattaagagtcaaaaattgcaaataaatgaagttggagaaaacctgtctagggtatgggttgaatatttattttaaggagcatatgatagaagcctactagatagtctattaatataattctctttcttttcatagctgggctttgcagatctaaacctggcagagtttgctggatcaggaaataccactcgccgctgtttactggaaggctatgataccaaaaatacaagacaggataattccattcttaaagtaagcacgtttcaggatttacttgtcaagaataaaattatctgcctttaaataagcgtatgtatatattgtcaaggacaagatgtgaatcagtgctgatatgataaactgaccataccactgaagtattcatcacttagggaaaaaccccatctaagtcacaaatgcagtgaaaagtaacaaatgttcaccttcatggtccaaaggtgtttttctttgacgtttgagcattcagagaatacatacaccactataacataagagctcattgggaggaaggagcatgatgaattaatgaataccttaaaatgtttgtagctcccataaggtgatttacagagcagctgcgataggtacatagaagccactgtgttctcttgtaaactagtgaagtgacagatggaacccacttctgggcatctgcccggctttttccaagtaccatcaggagctatgtgctctagtaatgagtgcgaatgtatacttcatagagttaattgtagtattaaatgagattaattgagaaaatatttgtaaagtactttgcgcctaggaaaccccattagatagaccttttgcagtgtttcagttaggttaccccatgatggtaagttatctaataagaaaggaaaatagttctgagtaaaaactggtgttcaaaagttagtgaagcaaagaattacctgatactctacagttttcaaacttttttgcagcaaatcttaagctctgaacatacgaaaatgtgtaaaatggttattatggccagtccaatgcataaagtggtttttgtaaccctcacacaaatttagcagctggaaagaaaggtgggacagcgagttgatatgggaaggaaaatgttcagaagacaaggaagaaattagaaaagtatcacaatataaacttctgtacacatcatgttgattgcatagttttgtggttttataactctaaaaagttttcaaagcacttgcccatatctccatgagatgaacagggttagacggatgaggatagattgttattcacattttatagatgaagagctgaaactaaagtatctcacaaaagtagtcagtggcagagctgggaccacagtgcatgtcttctcctgcctggtcagggttcttatttcctcgtatttcttatatgaaaagatggataattcttctcagaatgacaatgttttcattggaaattgaaataactttttaatttcagacccccactttcctaagagccaactcatggagtaatttccttctggcttcccattcatccttccacaccgtctctcccactttgtcctacaaaaaaaaatactctttgaagatcatgccattcagtcataacactctctcctttcccaatctctgccatctcctgaccccttaggtaccgtctcgctcctatccattgatgacttagctcctggctcacagtttttctctatatctcttctcaggtcatcatttttccatagcttcaccatctgtgcagacgagctagccttgtggactatcttatctatattttctctcctgatagctgatcttctatgagtctaaggcttctcggttccttaaactccctatctccagcaatattttcctcctcctcatctcagttcctactcccatggtcacactctagagtctagacctttttactcctagaaacttcacccccaaaaaatttcaatttaaagttttcttcctcctaccactgtctcttatgtttccagtcctcttagtctcctactcacttagctatctttaaccttaccactctcccactatccatcagccctgacttgcttctacttccctgtctatccagcttaaatttcatgggtccataagggcaggagttcaagaccagtctgggcaacatagtgagaaccccatctctaaaaaaaaaaaaaaaaaaaaaaatactcctggctcctctgtccctgtctccctgcattgtctgaataatccccaacttttgttaactcacttattaaatatctacccttgcatgctgagcattgctgaagagaatcacacaaccagactagctgccattactaaagccatgctcactgccatctggcagtcatactctacttccttcatatgcttcctttctcaattttagatattctgtctcataccttttttctcctcgtatcccaacacattattcttgctctcagatactgaccttgccttatcctattgagaaaacagaagccattaaactcaaattccctcatcttcccatcatagactttacctgcctctcccgccttatcctttttgtctcctgttacaatggatggcatgtcccctctcctgtcagaagtcagtccttcctcttggcttctggaatccaaagtttgcctaatcaagagctttaccccttagactatcccctcttctcatcatctctacctcgaatgaatcatcctcatcaacatataaagaaacagctccactgtttcccatatttataaagaaagacaaaaattaacctctcatcttcttcaactactgtcccacatctctgttctacttaactattcagttccttaaagctgtatgtgccatctccatctcctttctgagacatccgtgatattcaagagtgcagttttgatggagttggaaagcagacctcagggttctatgaaagaagagatgatgaggaaatcagtgcagcaggatagatttggcatttaaagagaaaaaagagtcatggaggtgctgggatgaggagataggaatgaaataaggctatataagatacatgtcatccattagctgcagaacatacaacaatgtacatattcttgtattcattaagactatgaattttgctatgtgcagccctgggatcacatctcagctctgccctttactagttatctggtttttaaaatatcacttaatctccctgaggttaaaatgaaaataattgctctctcctaggaatactgaaaattaaaggaaataatgcatattaaacacatagcttatgcctggcacataatgaattctcaaatcatgattgttgttaatgttgttgttactattaccattatcattattattcccataagaacataaagaggtcctatgactgactgttaaaggtagtcagcaactagagaatagcagcatcttagaaagtattagaaaagctttaaatcctggttgggcacagtgactcacacctataatcctagcactttgggaggccaaggggtaggatcacttgaggccaggagttcaagatcagcttggacaacataagcaagacctcatttctgcaaaaaaaaaagaaaaaggaaagaattagccaggcgtagtgtgcacctatagtcccagctactcagaaggctgagacaggaagatcatgagcccaggagtttaagactgcagtgatctgtgatagcaccactgcacttcagcctgggtgacaaagcaagaccttatctcaagaattaaaaaaaaaaaaaaaaaagttttaaattctgatctaaagctggaacaaaggtcagaagctttttactcttagaagccaccagctggcatcccttgaaacatcaacgtggcaacttgaaggaaaacattaccagacacttaggtaccacaggaatttgggagtaaagacagatagattagcacagccacacacccacaggattattactggtaaattattattgctatttgtttccattatttccattcagatttttgcaattttgaggttttgaatgttaaaaatgattttaatctatatggagcagtaattgaatattgaatataacccacttcttctttttttttttttttttttaatagagacagggtcttgctctgttgcctaggcgggagtgcagtggcatgaccatagcttactataacctcaaactcctgggctcaaacaatcctcctgccttagcctcccgtggatataacccaattcaacaatcattttatttaatgctttcccaatagaaaatatcggactaagtgctgtgaaggaagcattttataattttttataatcgtgatatttcttgttttatatttaggttttgatcagtatgcaactgatgtctggtgacccatgttttaaaacgtaagttgatacccaataaatggattatgtatctaaaagtataagaaagatttatttgtttaaatttttacattaatattttgtagtgcttataagaaaataccagttaagggatagtttcttccctgggagactgacctgaccctcttagaagttatgtttacctattaccaaatgagttctccatactccaaattattaatgctataggtctttcatcatcttcgggttttgcgtaaaattatataagcaaaaatttttaatacggcttctgtgaacatattcatttcttcaataaacacctattaagtgccttaccatgtgttaggccatattctagatactagagaaacagctgtgaaaaaaatagattaagtccctgccatcctggagcttatattctaagaggaaaatggacaataagctaacaagtaaatatataatatacaaacggttcataagcgctttggagaaaaaggatgggagggccatcgtgaagagaagtgttgctattctatatatagtagtcaggggaggccccccccggtaaagatgatatttgagtagagacctgaaggaggtgggaagcaagtcacactggcattagggggaagagtatttgaggtagaggaaacaaggacaaagaccttgagggagaagtgttcttggcacgttcaagtagctgcctggagagcagcgggtctaaagcagagtgaatgaagaggcgggtgataggagatgaggtcagatgataaggagtcttgtggccattataaaaaggactgccactcacactctgagtgagatagaaaagctattggaggttttgagcagaggagtaaaattatctgacttgtggctgctagatagggaatagacaatctgtaggagtaacagagaggacagggacacaaataagtagataaaaggctgttttcagtaatccaaggttttaagcctgagtaactggaagaatggtgctctcatttgttgagatgagaaagacaagaggaacaaattgggagcttgggtgttagacgttttaaattggagatccctatttaacatccagcggggcatgtcaagtaggcaattggtggatagatcaactagagtccagtggggagatctgggcaggagatagaagtttggaaattattacatcatcagcatacaggtagtaattaaagccatgagacttgaataagtaactagagggaacgagtagagatggaaaagaaccagagactgaggtggggacaccccagcgtgttagaggtcggggagattgggaagaagaatgagcaaagaaaccaccagtgtgatcagaggaggaaagcaaagcagagtcctgtcctgaaaaccaaatgaagaaacggcctcagaaaggcaggaataagcacctgtgtcacacgctgctggagtgggtctcagaaaatgaggactgaggattgacctttggaatttgcagtatagagactattgatgactttggcaggcactttggtagaatgcccttagactaaagccttttgagcatgggttaaagagagtttgggaggagaaaaattggagacagtgagtataaacaattcttatgaggggttttgctataaaaaagaaacagaaagatggggtcataagtaaagagaggatttggagtagggcaggttttattcatttttaagatggaagatgatataacatatttgagtaccaatagtattggctcaacaagagggaaaaactgatgatccagaaaagggactgttgctagaacagcgcccttggattgttggagggaggaaggcagagaacatggctactgacgcaggtagaggagaaatggaagcatatagaagttcttttccagttgcttctgatttcttagtgaaataggaaacaagatgctcattgaagagcaaggacagggaagatagaggaaggggtttgaagaaaggaaaaggtgtgcagaagtcctcacagagagtgagcatgaatggaacagggaaatgcaggattgcctgtcagcagccttgaggacacttaatgattaaaagtgaaagttcattgataccattgaaatatctgagaaaaatacacatagaaaactaaagaaaacattacctccctatgtatcaacttcatgtttttaatagctgtaacttagaaagcaacatttggccgggctcggtggctcacgcctgtaatcccagtactttgggaggccgaggcaggaggatcactctacaaaaaatacaaaaatcaggcgtggtgatgcacacctgtggttccagctacttgggaggctaaggggaggattgcttgagcctgggaagtggaggttgcagtgagccaagattgcaccactatactccagcctgggtgacagagcaagcccctgtctcaaaaaaaaaaaaaaatcaattcttgattaaaaccacacatcttcctataacttagccttcctgtgctgtcttctgataaaccatggtttcctgactcctttattttctgctttcttgggattaaaccaattttgctatactatttttggtgtctcaggtaactgtttttctattggagtaagatttagggtaaaataagaaaatgagcagcaaaacttagtagaagaaaataaattgatcgttccttctcatgaactttttatggatattccctttcttgccctttctcttcccttttctctctctacttaaactcacatattgaagagcttgaaagtagatcatctaatgttttatattatctccataaatttaattctgacaatctggagtttatatttacagagaaagacttttgtaattcataaaaataagcagacattacctaattccaaatacataaaatatttttcaagagaatcaaaccctcagtagtttttcttttctctttgaaattgttcaaatgtcattgaaaaaggggaaattctaacacattcatacacttgcacatactgaatatgtactgaatagaaaaacattttaactactgatgtaaaaagtaaattagttttatcaagttatatttaaatatatgtcaaatatgtaaagtcacattactttagagccgaaaagaatgttggaagttgtctaatccagtgatttttttagactatttagctacaaaatcctttgctcaaatatattatgaggccaagcatggtggcttatgcctgtaatcccacactttgggaggccaaggcaggtgggtcacttgagtccaggagttcacgaccagcctgggcaacatggtgaaaccctgtctctaccaaaaaataaattaaaaaattagccaggcgtggtggtgcgcctgtcgtcccagctactcaggagtctgaggtgggaggatcccttaagcccaagaagctgaggttgcagtgagccaagatcatgccactgcactccaggctgggtgacagagcaagacctgtttcaaaaataaagcaaatatattatgaatcctagtatataaaattttactttatatcccctccaacttaggtaagataagaatagattttccattgagcacactcccatacctacttccagaagtccctaaaggagatcatgaaaccagttttaaaagtgttggtgtaatccaagttctcattgtacagatgaggaaacggagtaacagagcaattgtgtgactttactcagtatctttgtccagaatgaagatgtaaataactgctggagggcttcattctaccattgtctgcttttgtctatctttaaatttttcatgatataaattgttttaaatttacttgagaaacaggagtatagcagatccttagtctcaagtttaaatcctagttttaatattttctgagcagaagatctgtgacatagattgtataattcttctgaagcaccaattatataccataaggccagaatttatgaagaagacagctggtaagtcagcctaaccacctaccctaaactttattgcatagttctctacaactcatcaaacacccaccaactcttgtaaaagaatgaaattcactctgaaaagtgctaataaagaaaaaagatattttgagagagaaagtgtatactctgctggcatttgggaatgtggtggcaaagcagatctaggggtgatataagtctcttgaatagcaaggttctgacgcgttcatattccaaaaggaaggaaattatcatttgtgaaaatgatttcatgaatgttactgtctctcaattcttaaaactctgtaatataaatattatccatatttttgagtgaggacatcgagactaagaggttaaggaattaattcttccagggtcccaggatgcaatcattcattcggtacatgtgtattgattgcctgccacatgccaagacttaacaagctagaaaagaccagcccctgctctgaagggattcactgattacgtgggagacaggcacacagcatacagtgtcactggggcacacaggataggatccctagccacagttctttgaaagccagggaaatctttactgagaaggggacactgagctaagtttaggggatgactaggaatttactaagcacaggaggtaggtagggacaccccaggagagaaaactgtgcacaagtttatgccatcgttacagggcattgagtatttaagaaatgtcaaataggtaatgttgtcgttttatgaggtcatttttcacatattcttaacattactataaagcaatcaaattaaagtaatcccatttctttttctatacttgacccacattaagtgatttcagatgagatataaaagcattttcagaacaaaaggggtaatggaacaaaaactggcacatggcaagcactcagtgattatttattcaacaagactgagttgtccagggaggtaagagagctgccaagccccagctaagattttggattctaaatttgctttactatcagtccccatagtcagtgaattttctccataatgcttagttgccccagtaatagagcagttagtatagatggctgatattatcaagggttgcagttcttcagcttttttgagaccgcagaacaaggggtgccaaattgaaggtgttgcttaaagagttgtggctgtggagtcaggctggaagggagaatggagccagagggaaatagagagggaaggggccaatgtttgggagttctgagggttggaaaacaggtctaagacatagaggggatagggacactgtaatcaggtcacctgtgaaagaaactggcattaaaaaggtaagaatttttagacatgcaggcatgagtcagccatcagtgattaatgactatgactgtaggctccattctttgtgtttcttctgtgtattagtttttcccatgaaatatttaatgcagggtgtttttttttttccacaaagctattttacattatttgaaaatacagcccgagcgtggtggctcacgcctgtaatcccaacactttgggaggccgaggtggatggatcacctgaggccaggaattcaagaccagcctggccaacatggcgaaaccgtgtctctactaaaaatacaaaaattagccaggcatggtgacgggcacctgtaatccaagctactcaggaggctgaggcaggagaatcacttgaacccgggaggcggaggctgcagtgagccgagagtgcgccattgcactccagcctgggaaatgagcgaaactccgtctcaaaaaagaaaaaagaaaggagaaagaaaatacagctgttggtaattgaagaggcaggtctaggccagactgcaagttctgagggatttgagttttatgccgaaggagctatggaggggttttaaataagagagtaacatgttcagaggcaagtttcagaaagaccacagtgacagtagcatggagtagagattggcagaccagcaaggagacccttgcagtcagccaggagaaaggtacaaaggccaaaactcaagtaattagtggagatggagaagagatgatgaataggaaaaatactaaatgaggatctgagatttggaaattgattggacatgggaaaatgttattaggaaggaggcagaggtgatatccgtaattctagttttggtgactttgtggattgcaatgacatttacagagagaatacaagaagaaaacagttttgggaaagatgagtttagttggggagatattgagtttcacgtacctgtaggacaaatacttgaaagcgtctcaataggatatgtaagtctagaatttaggagatcctaggctggaaatagtcaataaatgcaatagatttaatagcaatcttaaatgtctctatccccaagaatccgagtagcctgagaactccattaagaataacagggtaagaatttaagaattgccataaagcaggtcagctgcatgattccttcagccacctccctgttttatctctggtcaccaaggcatagtttctgggaagatgtggttttcctctgcaatatcagcctcaaaaggttagggattggctgggcatggtggctcgtacctgtaatcccagcacttcaggaggtcaaggtggaaggatcacttgagaccaggagttagagaccagcctgggcaacataatgagaccctgtctctaaaaaaaaatgtttttagaaggttagggatgttttctaataaaaatccctatgttaaaaaggaaacccaatgggatcactagtcaacaataatttgttgcacgttttaaaataactgaaagagtctgggcaccatggctcacatctgtcatcccagcactttgagaggctgaggcagatggattgcttgaacccaggagttcgagaccagcctggacaacatagggagacccccatctctgcaaaaaaaatttaaagtctctactaaatgtaaaaaaaagccaggcatggttctgtgtgcctatagtccctgctaactgggggactaaggaagaaggattgcttgagctggagaagtggaggctgcagtgagccatgattgcgccaccgcactccaacctgggtgacaaagcgagaccctgtctcaaaataaatgagtaaaaaataaaagagtataattggactgttttgtaagaaaggataaatgcttgaggtgatggataccccatttaccctaatgtgattattatgcattgcatgcctgtatcaaaatatctcatgtaacccataaatgtatatacctattatgtatctacaaaaataaaaaaatattttttttttgagacggagtctcgctctgtcgcccaggctggagtgcaatggtgcaatctcggctcactgcaacctctgcctcccgggttcaagtgattctccttcctcagcctcctgtgtagctgggactacagatgcatgccaccacacccgtctaatttttgtatttttagtagagactgggtttcaccatgttggccaggctggtctcgaactcctgacctcaggtgatccacccgccttggcctcccaaagtgctgagattacaggcgtgagccactgcacccagccaaaaatttttaaagaaaaaaaaaactgttagaaattaaatttacccctccttgcttcacagcttttacgtggaataggagtttgaattaaccaatgaaaatagatccattactactcccagagaatccaatccaaaaaacaaatctaaacaactgggcctctctgtagactctccctgggcaggtgaactgtttacagagatgaaggtagaagataaaaccatggatactatttaaaaagtgagtggagccagccagggagcacagtctctgaagcaggaggcacgaggcattctcctcccagcctgattcaaaagggcttggcactgccttcctcagctgaaaggtgctgtcctgagttgacagttagagcaaccctcccttgaccagtgctgggttcacactgacagaggcctctctttttaggactctatggagacaatgcccttttcttgttatgttaaaaaaaaaaaaaaaaacccttttcttttatgaattttattcaagttttgaaaagatgcttatacgttatttgctgatctttgttactttcactctcaaaggggtaacattaccaagcagtctatgctaaggcttactaagctcaccaatcaataactattgtaaactttgaggctcccccacaactccagttcgtaaatgtttatttacaggcctccctccacttcaatgtctataccaattgctggtgaatctgaatctttgcaagaagatagaaaaggtggagagactctcaaagtgcatcttggaatagcaggtatggatgtgtggcttactggttttttaatttgtgagagacgacttgatgccctaaaaattctttgggaattgtgtgggtatttgacttgaaacaggccaataagaatcaacagttttaattatgtaattcttggttgatccagtgctttattttgtctaaagtattgtgctctgacagattaaaaactagatgttacaatgacactctcctcactgtatgcatctactccccacaggtacaagagaatactacaggattttttccatttttcccgttccattaccctgcaacttctgcaaagcagcttctgcctctcgggtgtcgctcctcttccatgaatcgctttccctctgtcagtggttctcaagccctagtgtgcatcagagtctcctggagggcttgtgaaaacacaggttgctggcggcagcagccagagtgttcgattcagtagatctgggttagagcctgaagttttgtatcactaaggcattcccacaagacgctgatgctgctagtccctgaccacaccttgagatccacatttccagacacacttctggcagcagtcagaatctgctccagaagtaaaagcatggtggggataatgtcaaggttgcaggaggaaaaggacttaggagcttccttctttcttcagtattatgtgaacaggatgtattgtttgaaagaagggaaaggtgaagttatataattaaccctttcactgccttttaaaatatgcaaatatttggtttcttataaataatggtgactctgaaatttcctgttttgggatcagtggatcttttgggaacttgtaaccattccattagctccttctcttcagcatgtaaatatgctgatttctttctcctactgaaaaaatgaaaacaaaaactccttagccctacatccttctctatctactgcactcccttagactccagcaggctggcgcatgtgctcacatgctctctctcttcccccactctgccccaaatatagatacatctctctctctctctctgtgtgtgtgtgtgtgtgtgtgtgtgtgtgtgtgtgtgtgtgtgtgtgtgtgtggagagagagagagaaagatcagcaagagatgatatatgtaccacacacttcttatagccaaacttctagaaagaatatactgtccatttattcctaaacacattagcagtctggcttccatcatctgccctctcttgctgctatcccctgatacatgattgtcaagtcctgtggacatttgttctggtcttatctgatggccagttattcattcttgatgctttctcttcccttggctcctacctctctgatctttccttttctagcttcttagaggcttcttcatcttcctccaacttccctttacatattgatgttccaaagggtttggtcccctcacttccttgagcaataccatctatacccttggctttatctatcacataaatgtaaatgtgattctgtgatgtacatgtgatcaaatgctttggggaaaggtccacttcataccaaatgtaacactgaaatccatctgtttctctttctacccagccagagtctaactaagttcttcatgatcaggtcttatttatttctgtatccccagcagaaggcccgggacacagtagatgagtgactgttgaataggcatcctcaggtgtctctaattccgcatatctagcacaagtcttcctaccttttcctcctgtcttttctacttcagttttcctgacacaaacttctcctttcttattgagtcctgctatttgtgcctatgaaacatctctccctctcagctggattattatgaaaacctacactcttatgccccctgtttatcctgttgccagagtgttcttcccaaaatgtagatttgatcatgtcacaccctttcttaaagccactgaactgttttcttctttaaactcatagaaggttcttcatcaacaggcatctactcatctttctagccccttttccctcggttattatactccactaccctatatgccaactttaccaaacgatctgcttccctacaaagaaggcatgctcttcccggtgcctttccttgctcatctagctcaggagttcctatacgtcgctcaagtcctggggttaacctcctctgttaccaggttgtgtcagatgcactgtcctttggagctcttaatagctgcttttttgtgcttgtatttttgtacttaccacattgtataagttttgcttctacctctaaactctaagcatgtattttgtcttattttgtacttcctataccttgtacagtattaggcacctgactgggtaaaatattaataaatattgattgaatgaataaattttgaaaaccagaagatatgtggatgacttaagatctgggccaaacccagaagtaaagagcgctgcataactcgatatgaaccaactttttgagttcagattttgctgaatgtttgcttttggaccacttatactctgtccagaaatgagaaacctttgcagaaggaccaggttactccagtattttccttgttttgcagcatttgttggtccaactgcatgcagtatcatttatagaatagctgctataatagctatgttactcaattgctttccttctgcttctaagttaaaaacagttcttgtttccaaatatgattgtgccctagggaaaatggtcacagttctgcattctctggaagaagcctggttctgaaaatatgtaattggcacctggaacatacacatgatcagaaactattagaaatggctttgacactgccttttgtacatttactttgaatatgaatactataatcactttcttaagaacttttactctcagtgctacgtcccatgctgtgttgatttaagccacagacattgcccaaattatagcctagcactaacaacactaacattaaagtaatagagtactctttagcttgctgttgtgatggatttttaaggaagcagtatttccttagaaaccacattaaaacctaccaattttgtgaacatttataagaatacatctgagtcatttttgttagagaaatactgaacactaaaactgtagcagttttaagatagagtgctgttaaatgttttgaacaacaggagtttattgcatagactgaactaataaaggactgaaataattttttaatgttatgaaaaatataattcttcagcgaactaaggtatttaaatactttgtatatcttgcaatacagttacttccattgcactgacttaaaaggatgtccctcattttgtaacttattgttttgataatgaacttggcagagtttataaagtctgcagagtagaatacaaattgaccattaactttttggcaataagaatgacatcatgttatgacatattacagatctttcagcaaagagtgcctctgttccagacgaacttggtgcctgtggacattctagaacatcaagctatgcaagtcagcagtcaaaagtatcaggtagaggctaacagtgaagttgaattccttattgttccaaagggacttgaaactgctgtggtgtgggggaacgatgtcagattgcagagtgtttgatatgagtattatatccaaggtgattttctctgacagggtatagcacgtgtcactcccggtcatctagtttctctgagctctgccacaggagaaatacctcagtgggaagcacatcaacaggagttgaaagtattctagagccatgtgatgaaattgagcagaaaatcgctgagccaaatcttgatacagctgataaagaagatacagcttcagaaaaactcagcaggtatccttttagtttaaagaataaattttaatttttaaaaaactttgttttcataacataataaaaaggaaaaaatgtaattcttttcaaagatgcccagtgaaacaagattctgtagaatctcagctgaagcgagttgatgacaccagggtggatgcagatgacattgtagagaaaatattacaaagtcaagacttcagcctagattccagtgcggaaggtgtgtaggtaactgttaagcatagattcctgcaatccaggtttttgtaatctgtgtagtcagcagtaaagaggctcagaacatcataatactgactgttgcatatttgtatagtaaatttcatgcccataaaaatatcaagataactttatagctcatttattaatgagaatgagtattgagtttagaaaaagaacaaatgttagttaaaagtgatcaattttaaataaaacatttattgtgtttttaattatgcctagatgtctacagcgttcgtatacctaatgataggtatctacatctgcttttgttataagtgctttaagccactgttgtaatttggaggtggtcttagaacaatagtgaataatggaatccttcattccctccttagaattttcactgaagctgaaaatttgtatgccaccaatttgaaaggtataattactcatgttgatgtgaatagaaagcacttaacagtggacttattttcattatgtagttgggtgtaaagagaaataattaaaccttactttggaaatttctaggaagagctatctccattactcagttaaaagaaaaagagttttagaaacattgaagagaaataacctttagagtatcttttaaattgcctattttaaaacatgtatataactttggtttttaagttgtttatttctctaataaacaattgtaaaatatgaattattacaatatccatatatttgacaatagtctaataattgtacatgtaacaaacattttaaatgtgtattgcagaagaaggactaaggctatttgtgggtcctgggggaagtacaacctttggcagtcatcatcttccaaataggtaagtagtacaaatagtgtcttattaaaatatagactaatttttttaaaaaaatcatgagtagaggatgatggttgcaaagtttgtactaggctgaagcaaggaaacacagatagtagtagttacatgcgaagagttacagctcttagtgtagctctcagttttcttaattctgggtatgtttgacattatattttataaattagtttttaatttccttagaaatatttttaaagggtattagtcaaggaccagtagaccattgggaaagttgcaatataaaaggacacttagaaaagagttcttagtctttcaaaacattaattttttattaatttattttctagagacagggctgttgcccaagctggagtgcagtggtgcagtcatagatcactgtagcctcaaactcctgagctcaagtgatcctcctgccttagcctcttgagcagctgggaccataggcatgcgccactgtgcatcgctagtctgataatttaggaagagcaaagcaaaattacattttcagtcaatgatcttatcttttccgagcagttacacagccactgagcaacttaagctgctgttaacctttcttgtactctccttttctccaccccactgccatacatattaaaaccatcattctcagcaaactatcgcaaggacaaaaaaccaaacaccgcttgttctcactcataggtgggaattgaacaatgagaacacatggagacaggaaggggaacatcacacaccacggcctgttgtggagtgcggaagcggggagggaatagcattaggagataaacctaatgttaaatgacgagttaatgggtgcagcacaccaacatggcacatgtaaacatatgtaactaacctgcacgttgtgcacatgtaccctaaaacttaaagtataataataaaaaaagaaaagttctgaaaaaccaaataccattttgctagttattcagatgcagatgaagaaaagtcacctgccaaacttacattgattatcagcactgcagcagataatagtgagcacagacaccaaggacagtgtaggaattctaatcactcacttgctccttaacaacctgctccccacacttctgtgcacccctaattccattccatgtcgtatttatgtagagtccctgcacaactacagagtgagtcacagttgcaggtgggtagctccttggaccaagacagttattgtattctctcgtggtcaaaacctaaaagaattttgcattcatttcttttactaatactcattttaatgagtacctcctatttgtccagcacattacaaggctcaaaaatagactaacagcaaaaacctacatcaacgattaactacaatcagatatcataagtaggtaagagagagacatataaagctactttcagggagtaatgtgaaaaaggatttacagaagatgtaacactatttagatctttgattgactcatctgcttattaaattcagtaactgtttcttgggccaatttgtaggtaaggatgcaagtagaaaagacccagctcttaccctctgctggcttatggtctagcacatggggctggcaggctatagcccataggccaaattggcccactacctgtatttataaagtttcattggaacacaaccatgcctgtttatttgtatagtgtttactgctgctttgatgctacagtagcagagctgagtggtgcagcagagactctgtggcccacaaagcctaaaatatttactgactcttttttacagatgagatggacaaactaaaagtcataacattataataaatactgtaatagagggaagtttgagagaacagaaacaggatctcagagttcacacttgaagagagactttgggagaataaaaaataagtggggggcttataaggtgaatatgatgaatacaaatactcctggtaacaaatagaatgagtttataagtacagtaattatgatatataattatatcataataaacatatagcaattataggtagcattgagcatttattagttatgtgccaggcacaggtacatatatattttttattcaattcttatgtagtagtatctttcagtgctcacaacatactacaattagtttggtgtttttttaatggaaacaaagatacaaagaagtaatttgaggctggacatggtggctcacacctgtaatcccagcactttgggaggccgaggcaggtggatcacttgagatcaggagttcaagaccagcctggccaacatggcaaactcccatctgtactaaaaataaaaaaattagccgggtgtggtggcgggcgcctgtaatcccagctacttgggaggctgaggcaggagaatcacttgaacccaggaggtggaggctgcggtgagccaagattgcaccactgcactccagcctgggcgacagaatgagactgtctcaaaaaaaaaaaaaaaaaaaaaaaaagaagaagaagaagaagtaatttgcccaaggccttaaaactagtaagtggtaaaaccaagattaaaactcatgtctctttgagtccaaatcccattgtacttaaccagtatattttactggctcattaataatataacatagttcaggttcttctgaggagagggggttgtgaaagggtatttaggggcatgaggttggcaagcatctctgagctaggttgtaaagggcctcacttgccataacaaagtttcttcttctcatgtgcacagtggggagccattggccatctttgcagggaagtgacctatcagattggcattttagaaaaataaccggccataatttgaagggtagattagagcaaggaaagaccagtagcagggggaactaggtagaaaagtaacatttatgaggacagtggtatgaatgatggagtgaacatgtgtttttgagttagagacttgggttcacatcctagccagaccacttttggggcctgagtaaatcacttaacttcaatagaactttagttacctctgctgaaaagtaggaataaccatgcctatctcatggagtaattttaaagggtaaatgacataatatactcagtaagccctggctttattaatttaggtacagaacagcagaaaaggtagttccaaccaaatggaatttttttttctaagagatagggtctcaccctgtcacccaggctggagtgcggcacaatctcagctcactgcagccttcaaccccgggctcagcctgctgagtaactaggactacaggcatgcaccaccatgcccagcatttttttttttttttttttatagagacagagtctcactgtgttgcccaggctggtctcaaactcctggcctcaagtgatcctcccactccagcctctcaaagtgctgagattacaggcatgagccgttgtgccaagccttcaaccaaaaggcatttaaatagtaaatggtcaaaagcacgggctgtcttagactgcctgggatcaagtcctagctcttccactattgattgatactgttgacctctgtaagtctcagtttctttgcctataaaatgagagtgataaataagatcctgaactcataggatgtaagactaaattagatgacttatgtaacattttttggttttcatttttgaaagacaaggtctcactctgttgcccaggctggggcgcagtgatgtgatcacagctcactgcagcctccaattcctgcactcaagcgaacctcctgcctcagcccctgagtagctaggactacaggtgtgagccaccatgcccagcttttcttttttaactttttgtggacacaaggtcttgctgtgttgcccaggatacagcctggcccacttgggttttcttactgggaccggcatgcacctgcctgctttcctttagggacgttaaattttttctgacaagaagtctgcctgtatttttattttattcttctgtatgtgatttgtcttttatatctggctgcttttaagattttctgtttattactggtttttagcactttggctatgatgtgccttgaatatgtttttccttgtgtttattctgcctggggttcatcaagctttttggatctatgggtttacagttttcatcaaatctggaattctccagccattattttccccaacccctccttctgttattctgatctacaaattctagtccctagcccctctgagctttgatctctgactccttcactcagagagaccagcaggctgtgtttggggtcttcctctctgcactgcaggctcggaagatcctgaaggaaactgcttcaggcagctagctggggcggttgtcgggctctcttcatttatttcttgtttcttgggaccacagtcctgcactgcctgttgtctagtatgtgcaaactgtcatttcacttattctatccggttttctaattatataaggcaggagggaaaatctggttcctgttacttcatcatggccagaggcagaacatatttaaaagggcatctaaaagccagtgtgccatgctgcccaccatggtttcttcaaattctgattttctgtaggatgaatgggtgctcactggcattctgttgaggaagttcctatttcttctgtagaatgaatctgtgagaacaggagtttctgggcaatcaactgagaagtccagccaagtccatggtgggctagtaatcactaccttacttctgttgtttagaatttcctcttaaaatgccattaaggagagacactagtcatggtggttgcttctgggcttactaaactcaggcacactcatggtaaaatgacaagtagtagggtataccctaacatcttgacaaattgggaaatgggtacctggtgataacttcaggcagtaatgggccaggcgtggtggctcatgcctgtaatccagcactttggaaggctgagttaggaggattgcttgagcccaggagttctggttgcagtgagcttcagtcatgccactgcacttccatctgggcaacagaatgagaccctgccatgaaaacgccacaatattatgacagctgaagaccatcatcattaactcagtgcaagtcctgatgcactgccagagtcaacatatgctcttggatgagacctattttagaatgaatagataaacatgtttgaagagcatttcttgccaccatttgtcgataggtcaagaattggggaattctaatagattattgtgggaataagtgtgagagaatcaggatctaggctaatccaatgtattaatgataaacatttaatatttcacatagtttctatccgtgatgcctttaaacgttatggaaatcaaatctagtagaaaaatacccagtgccccatctctccaggggtaaggttacttggaacagtttcaaacactgcagctcaaaattttgaagtttttttccactgctgttttagggtggggtctggagcttatgaacaagttgtgatcaaacgctagaagtcaagtcggtgaaaacatttccttgtggatttaagatgtgagtagttgatgtatcaaggcattttattcaagcacttaatagaaaatgaacctcaactatcaagaggaaagccaatgctggtttcttctctggaaggacccaccgccatcctgtaccagccaccaaaggggaacatctacatggcagtctccaggcactgtgccactgtgtgccttggaagcacctggcttctgtggtcactgcacatcataatgaaaagcctgctttttctttcagaacaccccagcggagaaaacagcattatatacatcggagtatcattttaggattcaagtgtaaaaatctgtgatcaagaggctcaatagatttgggctctatggtttggtttttttagtttgagagacagtacatgaatataacttaaaccctatagattttgtcaagatagttgtaattcctgttctggaaatcttccctattacactacctacagcattgtataaagtgtgggtgttcatgctttgggaaaatgttagactacaatttaaacatgtgatgtgcttattcataattctcagtgtatcagtcataaatgaaataacaagtgcatttaagtcagagatacgtgaatggatgtaatgccgttatgcagtatatattgttaattgtcattaatattagatgagctgcagaaccacccccaagcactacataaaagactcaaaataagtttaacacttactgtgttgggcaccctaacagaagagctatcttaactcattgaatattaagatctgctggtttcaggagtcaaaatgtagaaaaagaggagaattgtaatatggtcagaaacagagaagccttttctatgtaaattcagacttatctgaggctaacagttttccgaagtggtggtgggtagcagcatgacagctgcttgccatgactgatgcagactactaggtttccattttagctctctgtaggtactgttttcttccccactgtgtcgaaagtgatttgttttgaagcaagagtagaatataacatctatcaaatatagcttttaaaataagaatacctggtctggatccagttgagcagcacagcagataaaccttagagtttttctgttcttacatgacggtttccatgtggaaagatctaaactttcttggaatcactattagtgaagaaaaatgtagaatctgtataaccagtaattccccaattcttactttcaaagtcatatccaagaaagacaatatgtcagaatagaatgactttggtctaggtgttttcacgttggcaaaaataaggaggaaattatattattttaatatccaaatttaaaggtttggaaaattttgaatagttaatattagaacttatgttgctgttttttatatttcaaggattgagtattctgcattaatccaatactattccaacaaagagattctggaagtttttaaaaaatgataccctgttttatattttgaatgtagagagactctgagagagagaatgttctgagttatactttttattttttaagatttatttttaagaataaaacattgacctgaacattttagcctaaccaagggacttaagtggtaaagacttgcattatgtcttcatgtgaactgatccgttcattatatattatgggaaaaatcaaagaaagttttttatagagatatgaagatattatttagagagatatttattatgacattttttaaaaacatatttttctattttcaaaatattatttctaggctatatttttattggtgctgtgcaaatgattttgcagttttgaaaatgataaaactagattgtaagtggggttcagtgaggacattcatcagacacgtaagaggtgctgcaatcagggtgatgcccatcttactcatccttggctgcccttggtccgacacctctctatacaagactggttctcagtattttaaatggtacagaattctttttaaaaagtagagagattttgaaaagcataaaaatcatgcctttataatcttagcagccatcagatacaccttgatttatgtagtagtaaatataacaaatattttaataaatagaaacactgataaggaagaaaaaagaactaatgtctatgtcttctgtagtcagcaaaagtctggatccattttctattttgtgttccattggcacactttgtgttcaaatttcagtgcagtcctttcaaaatactcgctaagggttgcctaagtgtctgccttactttctgattgtccttttctgagagcatggttaagaacatcttaaccatatagctgttgaaaaaatctgtttattaaataacaagttcacttctgtttatgttttgagtttagaaaatttgacttgaaaatttagattattaataaatttatttttaaatattaaagtcaaatttcaaatcacccagtgttgaagaatttgcagatgtatacaatactttttctaattatgtcttttctatctccatgcctggctttttctaattatatcctagagaaaaagactaatggtatttcaaagctgtgtatttgtgacgagataaagaagagtcttaaacatcttgtttgggagaatgcacaggccagtcaggagacccacctcctcctgtgccctgagctgctgagacccgacagatcatgaaggctagtaaagggcagagaaggccctgagccatcagtttacactcgaattgttgactcccctttgtggtgtttttgaaggctgcttataccaacagctaatgtggattagtgcttatgatcttgaaaaagtcttgaccaagaatcctaaactccaccactcctcccattccagcttaacactatcagaataatatccaaattccagatttttttcttttttacttttttttcttccttttttaagagagacagtgtcttgctcggtcacctaggctggagtgtagtggcgcaatcgttgctcactacagcctcccaactcccaggctcaaatgagcctcccaccttggcctcccaaagtgctaggaccacaggcatgagccactgtgcccagcctagtttcttttctgtatgctttttttacaaaactgtgagccacagaggttgaccacttagccaatttgttgctagaagggagaaaaaaatctccaactagcctccagacaaaacatactcaaattcaaacagcagttagttttaattaacatacagaagtaattttagactttcagatttctatgctgactagaacactttgcaggctgaagctgacattattaccaaatacttcatttaagtacatactctgaagtgtcaggcttccagtatatatagcaacgctctgagagacaaactgggctcatatgacggggttgcattttattttcttaacaggtctttaaattgggcagttctgaaattctgtttggtcagttctagatggtacgtcatgtgaatgcaaccaagcactgtagttgaaattgtgttatgccactactcatgttgtcttaggtactacgcataatgttaatagctgagatgttaaagaatttgaagtctaaaatataaaagatgaatatacccatattaatcctatgttaagatgctctggaaataaaggccttattcccttacacatgcgatttttgtaagataatatatacacagtatattttaaatgtttgtgtgggtggtctgtgtagttactccccatacaacaaagctgacaaaatttttaatttacacaatgtattctgcattttcaaatgtttatgttgtgtatatagcaaagaaattatcttactgatatgcgttgaccaaatcccatggagaaaagacatctcatttgaggttccccttcctctcatgtgtttgattttttggaaggtgatacagtatgtgggtaaccatgcaaatgtttatgaataactttactgaagtgattccatccgtattctgttctaatacttggagaatgaccttcatatttatatattttatttctttgtttcaactatccagtgataattcaggaaatgtttccttttttttttttttttacaaaaactttttatttgtaaaatgtttgtaataatgtaaaggtgaacatgttcaataaaaatcatatattaaaagtttagatgttctttatcttttaaaatatcagttaagattccatcagaaaattgtgccaaggtgaaatgaaagaaccaaaataacttatccctgagggtttatttatttattaccagggagcatgggacagatttgaacgcccccagtggcggatttctctttgaacccttgggcagcccatgcagtggcatggacctgggctttgggtgagacaaacctgagtctgaatacaaactcccctctgaacctggcctcaaactcctgagctcaagtgatcctcccactttggcctcccaaagtgctaggattgcaggtgtgagcccatgcgcctggcctgaacctattttctaatctaggatgggcataacaccaacactcttactgggttgtgatgaaagacacgggcattattgttaagagtatgctactttctaggcactcggtggtccatcaagccaaaatttgccttcgtatagcatctacacacatatactaatttctagtgttggacatacagatgcttattaaatgtgccactattagcatatacccaaaagaaaggaaataagtgtgtccggaattggtgggtttttggttttactgactttaagaatgaagccgtggaccctcgcggtgagtgttacagcacttaaggtggcgtgtctggagtttgtcccttttgatgtttcgatgtgtttggagttttttccttttggtgggtttgtggttttgttggcttaggagtgaagttgtagacctttgtggtgagtgctacagtttttaaggcagtacgtctggagttgtttgtttcttttggtgggcttgtggtcttgctgggcttaggagtgaagctgtagatctttgcagtcagtgttacagctcataaaagtagtgtggacccaaagagtgagcagtagcaagatttattgtaaagagcaaaagaacaaagcttccacagtgtggaaggggacccgagggggttgccactgctgactcaggcagcctgcttttattctcttatctggccccacccacatcctgctgattggtaaagctgagtggcctgttagggcactgattggtgtgtttgcaatccctgagctagatacaaaggttcaccacgtccccatcagattagttagatagggagtttccacacacaggttttccagagccccaccagagcagctagatacagagtgttgattggtgcattcacaaaccttgagctaaacacagggtgctgattggtgtgtttacaaaccttgagctagatacagagtgccgattggtgtatttacaatccctgaactagacataaaagttctccacgtcctcaccagagcagctagatacagagtgtcgattggtgcactcataaaccttgagctaaacacggggctgattggtgtatttacaatccctgagctagatataaagactctccacgtccccacccgactcaggagcccagctggcttcacctagtggatcccgcaccggggctgcaggtggagctgcctgccagtcctgcgccgtgcgctcccattcctcagcccttgggtggtcgatgggactgggcaccgtggagtagggggtggtgctcgtcggggaggctcgggccgcacaggagcccatggagtgggtgggaggctcaggcatggcgggctgcaggtcccgagccctgccctgcgggaaggcagctaaggccgggcgagaaatcaagcgcagcgccggtgggctggcactgctgggggactcagtacaccctccgcagccactggcccgggtgctaagtcccccattgcccggggccagcaggctgctccgagggcggggcccaccaagcccacgcccacccggaactccagctggcccgcaagcgccgcacgcagccccggttcccgctggtgcctctccctccacacctccctgcaagctgagggagtgggctccagcctgggccagcccaaaaaggggctcccacagtgcagtgggggggctgaagggctcctcaaatgccaccaaagtgagagcccaggcaggggaggtgccaagagcaagcgagggctctgaggactgccagcatgctgtcacctctcataagtatattgaagagatacctgcacttttacatttattgcagcactattcacaatacccaaggtttggaagcaacctaagtgtccatcaacacttagatgaattcacagagaaaatgtggtacataaatgcagtagagtactattcagcaataaaaaagaatgagatcctgtcatttgcaacaacatggatggaactggaggccattatgttaagtaaaataggccaggcacagcaagacaaacttcagatgttcttacttatttgtgggaactagaaattaaaataattgaactcatggagataagagagtagaaggatagttaccagaggctgggaagggtagttagggggtagggtgtgggaggtgggcaaaaaaaatgaatgaataagatgtagtatttgctagcaaaaaagggtaactataatcaaaaataatttaattgtacattttaagagtataattgggccaggcgcagtggctgaagcctgtaatcccagcactttgggaggccaaggcaggcgcgtcactagaggtcaggagtttgagaccagcctgaccaacatggtgaaaccccatctctactaaaaatacaaaaattagtcgggtgtggtggtgcacgcctgtaatcccagctactcaggaggctgaggcaggagaatcgcttgaacccaggagacgaggttgcagtgagccgagctcgcaccattgtactccagcctgggcgacagagcaagactccatctcaaaaaaaaaaaaaaagtataattggattgtttgtaacacaaaggataaatgcttgaagtaacagatactgttacttcacattattaatgataaatgttaaaacacatttaccctgatgtgattattacacattacatgcctatatcaaaatatctcatataccccctatatacacctactatgtacccacaaacattttttcactattacagtttaagatcatcacttaacaaatggtatttatgtcacctatatcctcgtacagactgttctattcccatagaccagaatgtcctcagagaacaaaaacaatgccaacagtgtccctctgctgatattcaaattataatagcaatttaatattaataaagaactatggtttaatgtcagtttgaacccagcatcttctctgcagattgtcagggcctccctggacagtgcagatttaaaaaggttatatgactaaagagaaagcaccctgctcttgtcaggacagagtagggtatggacactctaggggaaaacctccacactcctccccagtacagaggatcacccagaataactttgtaccagatcacagcagaacctggcaggactctgatctgccccctcagatgctgcccacatctccaacatggagttctcagacccagccttcttgtttcgacttggcccacctttcttcaacacctggtggctttcttcctctttctctgtctgtccttccctttctctttcacctgttttcacttcgcttcctgtacctatgcatcacttatctggtagcagcacataatgaaatctttccttccatttgtatgataggtaggaaatcactggtggaattaatccagtccacattatacaaagtttaacagaaaattaagaaacctaggctgggcgcagtggctcacgcctgtaatcccagaactttgggaggccgaggtgggtggatcatctgaggtcaggagtttgtggccagtctgaccaacatggtgaaaccccgtctctactaaaaatacaaaaaattagctgggcgtggtggcgggtgcctgtaattccagctacttgggaggctgaggcaggagaatcacttgaacccgtgaggtggaagttgcagtgagctgagatcgtgccattgcactccagcctgggcgacagagtaagactctgtctaaaaaaaaaaaaaaaaagaaacctaaacaggcataaatttagacagtccctgggtcagtgatctctattccatgtgaacctatttaataggaaatgtcagaaaatttcccaaatgaatgtttagacctcattcccatgcatttataacccagctaggttgaggtattacctcaaccatttcttaagaaattgacttcaccgcagatcttcaaaccatttcaacactgtttttccttagtgtatgcattgcagaaaacctcaaacctctgcagaaagttggcatgctaagcttttttggcatcttgttttttgaatcttatattggggaacccttaaagcgagtatgtgcagctacttaaaataggaaaagtgtgccaccttctggccttgaacgtctgttgattcagttcaaatctacctgtctcaagtgatcctatctgctcctatttcacatatatttcatgaaatttagaccaaaggaaaaacacattttttatcttgtaatttttaaaatttgaaataatttcaacagactttgaagcattgcacattttgcttaaagtaaaattgtttcctttggtgtaggattaatgaaaaattctctaagtacagttccatgaagatttctacccaaaagcactgcttgggcagcatggtaaagaacatatgtacagggccaggtgggaaacagcagtgagaacacacagagcctgttcagtgaaagcaaaggctctgatgggtcaagggtgatgtgtgggagcagggagtcatgttgttgggtaagacaatacaatcagatcacagtttaatctgactaattctagcttgagtctagcatgcaggatgaagttgagcatgtagaaagaaatgagattgttgcagcagtggaggcaaaagtgtgcaggcagagtacacacaattcagcaggaacattaagaacccaacagagaaatagaggacatgaattgttaactttcaagataaaaggtattaacacatactgctggcttcaaaagcttgtatttaacatttactatacacatttccaacttccagctcctagcagcttgtttgctagacctcagcaatattcccagctgtcccctttttctagatatcaccaaggatgtgcatcatatatgtgaaaggaaaatatcttggacccctaaaatcactaagcgaaaggaaaattcaaactggaaactactcagggcaaacctagctcccattctattcaaagtcatccctctgctcactgaggtagatgcatatctgactgcctcctttggaaaagcttatcagaaactcaaaaaaatgcaaccatttgtctctcctctaccagtgccctggaagctccctccttgctttgagttgtccccgcctttctggatggaaccaatgtacttcttacatatattgattaatgtctcatgtctccctaaaatgtataaaaccaagatgtgccccgaccaccctgagtacatgttgtcaggacctcctgagactgtgtcatgggagcgtgtcctcaaccttggcaaaataaactttctaaattagctgagacctgtctcaaatgttcgaggttcacaaatataatgataagccatgtttgctgtagttagcacctagcatccttcatgaaggcagaaacccacagttctcagtcttcaaaagaccacattgccactgctgacactgctcagtccctgacttcctgtcaactgctcgacacacagtctccacaggaccaggcataacgagataaagatttaatgttcttggcacccaaactctagttgaagaaattgcctttatttggagttctcccttgataaccgctggcagaactgagggctgagaacacttgaagggagctgaactgctgggcgtgccgtggggcagcaggttggcagtcacaggaaaggaggggagggggtggggcaagcgagggcagctggggaaggtgagctgggagctgctgccagatgagaaggagggtaaggtgggatgtgtttgaggagcctcggagcagcatagaaggggctgagattcacatctcagttgtatggaactgaacttgaaggcaggcagtgctgtgataacgtaagcttttaggaaatcatagaagtctcagagttttggagtta

1. A method of determining the likelihood of a patient maintaining remission of rheumatoid arthritis (RA) following cessation of treatment with one or more disease-modifying anti-rheumatic drugs (DMARDs), the method comprising:
(i) detecting levels of one or more biomarkers in a sample of CD4⁺ T cells obtained from the patient; and
(ii) comparing the levels obtained in (i) with one or more reference levels;
wherein a difference in levels of the one or more biomarkers compared to the one or more reference levels is indicative of an increased likelihood of maintaining remission following the cessation of treatment with the one or more DMARDs, and wherein no difference in levels of the one or more biomarkers compared to the one or more reference levels is indicative of a decreased likelihood of maintaining remission following the cessation of treatment with the one or more DMARDs.

2. The method according to claim 1, wherein the sample of CD4+ T cells comprises purified or labelled CD4⁺ T cells and/or wherein the levels of the one or more biomarkers in the sample obtained from the patient are increased or decreased at least 1.5-fold or more as compared to the one or more reference levels.

3. (canceled)

4. The method according to claim 1, wherein:
(a) the one or more DMARDs are synthetic DMARDs optionally selected from methotrexate, leflunomide, sulfasalazine and/or hydroxychloroquine;
(b) the one or more DMARDs are biologic DMARDs optionally selected from etanercept, infliximab, adalimumab, certolizumab, golimumab, rituximab, abatacept, tocilizumab and/or sarilumab; and/or
(c) the one or more DMARDs are targeted synthetic DMARDs optionally selected from tofacitinib, baricitinib, filgotinib and/or upadicitinib.

5. The method according to claim 1, wherein:
(i) the one or more reference levels are obtained from healthy controls;
(ii) the one or more reference levels are obtained from patients maintaining remission of RA following cessation of treatment with the one or more DMARDs; and/or
(iii) the one or more reference levels are obtained from patients showing a flare or relapse of RA symptoms following cessation of treatment with the one or more DMARDs.

6. The method according to claim 1, wherein the levels of one or more biomarkers comprise:
(i) expression levels of at least one, two, three or more genes selected from Ensembl gene ID ENSG00000102362 (SEQ ID NO: 1), ENSG00000247033 (SEQ ID NO: 2), ENSG00000276571 (SEQ ID NO: 3), ENSG00000204965 (SEQ ID NO: 4), ENSG00000241146 (SEQ ID NO: 5), ENSG00000250030 (SEQ ID NO: 6), ENSG00000213296 (SEQ ID NO: 7), ENSG00000229619 (SEQ ID NO: 8), ENSG00000125046 (SEQ ID NO: 9), ENSG00000182489 (SEQ ID NO: 10), ENSG00000144366 (SEQ ID NO: 11), ENSG00000237473 (SEQ ID NO: 12), ENSG00000228010 (SEQ ID NO: 13), ENSG00000250827 (SEQ ID NO: 14), ENSG00000042286 (SEQ ID NO: 15), ENSG00000231305 (SEQ ID NO: 16), ENSG00000255330 (SEQ ID NO: 17), ENSG00000227070 (SEQ ID NO: 18) and ENSG00000162636 (SEQ ID NO: 19);
(ii) expression levels of at least one, two, three or more gene variants comprising a sequence having at least 95% homology to any one of SEQ ID Nos 1 to 19 based on nucleic acid identity over the entire length of the sequence;
(iii) expression levels of at least one, two, or three or more genes selected from SEQ ID Nos 13, 19, 18, 4, 8, 2, 9, 5, 3, 14 and 15; and/or
(iv) expression levels of at least one, two, three or more gene variants comprising a sequence having at least 95% homology to any one of SEO ID Nos 13, 19, 18, 4, 8, 2, 9, 5, 3, 14 or 15 based on nucleic acid identity over the entire length of the sequence.

7. (canceled)

8. The method according to claim 6 wherein the levels of one or more biomarkers comprise:
(i) expression levels of SEQ ID NO: 18, SEQ ID NO: 19 and SEQ ID NO: 13; and/or
(ii) expression levels of one or more gene variants comprising a sequence having at least 95% homology to SEQ ID Nos 18, 19 or 13 based on nucleic acid identity over the entire length of the sequence.

9. The method according to claim 1, wherein the method further comprises:
(i) detecting levels of one or more cytokines in a sample obtained from the patient; and
(ii) comparing the levels obtained in (i) with one or more reference levels;
optionally wherein the one or more cytokines comprise interleukin-27 (IL-27), CRP, SAA, IP-10, IL-6 and/or monocyte chemoattractant protein-1 (MCP-1) and/or the sample obtained from the patient that is used to detect the levels of one or more cytokines is serum or plasma.

10. (canceled)

11. (canceled)

12. The method according to claim 1, wherein the method further comprises determining the patient's ACR/EULAR Boolean Remission criteria (definition) as Tender joint count ≤1, patient global assessment of ≤1 on a 0-10 clinical scale, Swollen joint count ≤1 and C reactive protein ≤1 mg/dL (10 mg/L).

13. The method according to claim 1, wherein levels of the one or more biomarkers are detected by polymerase chain reaction (PCR), array, sequencing and/or immunoassay.

14. A method of treating or preventing RA in a patient undergoing treatment with one or more DMARDs, wherein:
(i) the patient has been identified as having an increased likelihood of maintaining remission of RA following cessation of treatment with one or more DMARDs according to claim 1, and treatment with the one or more DMARDs is reduced or ceased; or
(ii) the patient has been identified as having a decreased likelihood of maintaining remission of RA following cessation of treatment with one or more DMARDs according to claim 1, and treatment with the one or more DMARDs is maintained or increased.

15. A method of treating or preventing RA in a patient undergoing treatment with one or more DMARDs, wherein the method comprises:
(i) determining the likelihood of the patient maintaining remission of RA following cessation of treatment with one or more DMARDs according to claim 1; and
(ii)
(a) if the individual has an increased likelihood of maintaining remission of RA following cessation of treatment with one or more DMARDs according to claim 1, reducing or ceasing treatment with the one or more DMARDs; or
(b) if the individual has a decreased likelihood of maintaining remission of RA following cessation of treatment with one or DMARDs according to claim 1, maintaining or increasing treatment with the one or more DMARDs.

16. A therapeutic agent for use in a method of treating or preventing RA in a patient, wherein the patient has been identified as having a decreased likelihood of maintaining remission of RA following cessation of treatment with the one or more DMARDs according to claim 1, and the therapeutic agent is the one or more DMARDs.

17. An assay comprising:
(i) purifying or labelling CD4⁺ T cells from a sample obtained from a patient having or suspected of having RA;
(ii) detecting levels of one or more biomarkers in the purified or labelled CD4⁺ T cells; and
(iii) comparing the levels obtained in (ii) with one or more reference levels;
wherein the levels of one or more biomarkers comprise:
(a) expression levels of at least one, two, three or more genes selected from SEQ ID NO: 1, SEQ ID NO: 2, SEQ ID NO: 3, SEQ ID NO: 4, SEQ ID NO: 5, SEQ ID NO: 6, SEQ ID NO: 7, SEQ ID NO: 8, SEQ ID NO: 9, SEQ ID NO: 10, SEQ ID NO: 11, SEQ ID NO: 12, SEQ ID NO: 13, SEQ ID NO: 14, SEQ ID NO: 15, SEQ ID NO: 16, SEQ ID NO: 17, SEQ ID NO: 18 and SEQ ID NO: 19; and/or
(b) expression levels of at least one, two, three or more gene variants comprising a sequence having at least 95% homology to any one of SEQ ID Nos 1 to 19 based on nucleic acid identity over the entire length of the sequence.

18. The assay according to claim 17, wherein the levels of one or more biomarkers comprise:
(i) expression levels of at least one, two, or three or more genes selected from SEQ ID Nos 13, 19, 18, 4, 8, 2, 9, 5, 3, 14 and 15;
(ii) expression levels of at least one, two, three or more gene variants comprising a sequence having at least 95% homology to any one of SEQ ID Nos 13, 19, 18, 4, 8, 2, 9, 5, 3, 14 or 15 based on nucleic acid identity over the entire length of the sequence;
(iii) expression level of SEO ID NO: 18, SEO ID NO: 19 and SEQ ID NO: 13; and/or
(iv) expression levels of one or more gene variants comprising a sequence having at least 95% homology to SEO ID Nos 18, 19 or 13 based on nucleic acid identity over the entire length of the sequence.

19. (canceled)

20. The assay according to claim 17, wherein:
(i) the levels of the one or more biomarkers are increased compared to the one or more reference levels;
(ii) the levels of the one or more biomarkers are increased by at least 1.5 fold or more compared to the one or more reference levels;
(iii) the one or more reference levels are obtained from patients maintaining remission of RA following cessation of treatment with the one or more DMARDs; and/or
(iv) the one or more reference levels are obtained from patients showing a flare of RA symptoms following the cessation of treatment with one or more DMARDs.

21. (canceled)

22. (canceled)

23. The assay according to claim 17, wherein
the assay further comprises:
(i) detecting levels of one or more cytokines in a sample obtained from the patient; and
(ii) comparing the levels obtained in (i) with one or more reference levels;
optionally wherein the one or more cytokines comprise IL-27, CRP, SAA, IP-10, IL-6 and/or MCP-1 and/or the sample obtained from the patient that is used to detect the levels of one or more cytokines is serum or plasma.

24. (canceled)

25. (canceled)

26. The assay according to claim 17, wherein the method further comprises determining the patients ACR/EULAR Boolean Remission criteria (definition) as Tender joint count ≤1, patient global assessment of ≤1 on a 0-10 clinical scale, Swollen joint count ≤1 and C reactive protein ≤1 mg/dL (10 mg/L).

27. The assay according to claim 17, wherein levels of the one or more biomarkers are detected by polymerase chain reaction (PCR), array, sequencing and/or immunoassay.

28. A kit comprising reagents to carry out the method according to claim 1 or the assay according to claim 17, wherein the kit comprises one or more agents capable of specifically binding to the one or more biomarkers within CD4⁺ T cells in a sample obtained from the patient.

29. The kit according to claim 28, wherein
(i) the one or more agents are labelled;
(ii) the one or more agents are primers; and/or
(iii) the kit comprises agents capable of specifically binding to SEO ID NO: 19 and SSEQ ID NO: 13.

30.-34. (canceled)
